(19) United States
(12) Patent Application Publication
(10) Pub. No.: US 2024/0415868 A1
(43) Pub. Date: Dec. 19, 2024

(54) COMPOSITIONS AND METHODS FOR TREATING HUNTINGTON'S DISEASE

(71) Applicant: VOYAGER THERAPEUTICS, INC., Lexington, MA (US)

(72) Inventors: Dinah Wen-Yee Sah, Hopkinton, MA (US); Jinzhao Hou, Lexington, MA (US); Pengcheng Zhou, Lexington, MA (US); Xin Wang, Arlington, MA (US); Jochen Deckert, Bayreuth (DE); Markus Hossbach, Kulmbach (DE)

(21) Appl. No.: 18/591,756

(22) Filed: Feb. 29, 2024

Related U.S. Application Data
(63) Continuation of application No. 16/302,140, filed on Nov. 16, 2018, now Pat. No. 11,951,121.
(60) Provisional application No. 62/338,113, filed on May 18, 2016.
(60) Provisional application No. 62/485,049, filed on Apr. 13, 2017.

(51) Int. Cl. A61K 31/713; A61K 31/7105; A61K 48/00; A61P 25/14; C12N 15/113; C12N 15/63

(52) U.S. Cl. CPC A61K 31/713; A61K 31/7105; A61K 48/0025; A61K 48/005; A61P 25/14; C12N 15/113; C12N 15/63; C12N 2310/14; C12N 2310/141; C12N 2320/32; C12N 2330/51; C12N 2750/14143

(57) ABSTRACT

The present invention relates to small interfering RNA (siRNA) molecules against the HTT gene, adeno-associated viral (AAV) vectors encoding siRNA molecules and methods for treating Huntington's Disease (HD) using the siRNA molecules and AAV vectors.

### CROSS REFERENCE TO RELATED APPLICATIONS

[0001] This application is a Continuation of U.S. patent application Ser. No. 16/302,140, filed Nov. 16, 2018, which is a 35 U.S.C. § 371 U.S. National Stage Entry of International Application No. PCT/US2017/033281 filed May 18, 2017, which claims priority to U.S. Provisional Patent Application No. 62/338,113, entitled COMPOSITIONS AND METHODS OF TREATING HUNTINGTON'S DISEASE, filed May 18, 2016 and U.S. Provisional Patent Application No. 62/485,049, entitled COMPOSITIONS AND METHODS OF TREATING HUNTINGTON'S DISEASE, filed Apr. 13, 2017; the contents of each of which are herein incorporated by reference in their entirety.

### REFERENCE TO THE SEQUENCE LISTING

[0002] The present application is being filed along with a Sequence Listing in electronic XML file format. The Sequence Listing is provided as a file entitled V2071-1035USCONI_SL.xml, created on Feb. 29, 2024, which is 2,758,528 bytes in size. The information in the electronic format of the sequence listing is incorporated herein by reference in its entirety.

### FIELD OF THE INVENTION

[0003] The present invention relates to compositions, methods and processes for the design, preparation, manufacture, use and/or formulation of modulatory polynucleotides, e.g., polynucleotides encoding small interfering RNA (siRNA) molecules which target the Huntingtin (HTT) gene (e.g., the wild-type or the mutated CAG-expanded HTT gene). Targeting of the mutated HTT gene may interfere with the HTT gene expression and the resultant HTT protein production. The modulatory polynucleotides encoding the siRNA molecules may be inserted into recombinant adeno-associated virus (AAV) vectors. Methods for using the siRNA molecules to inhibit the HTT gene expression in a subject with a neurodegenerative disease (e.g., Huntington's Disease (HD)) are also disclosed.

### BACKGROUND OF THE INVENTION

[0004] Huntington's Disease (HD) is a monogenic fatal neurodegenerative disease characterized by progressive chorea, neuropsychiatric and cognitive dysfunction. Huntington's Disease is known to be caused by an autosomal dominant triplet (CAG) repeat expansion in exon 1 of the huntingtin (htt) gene, which encodes a huntington protein (HTT) bearing a poly-glutamine expanded tract at its N-terminus. This repeat expansion results in a toxic gain of function of HTT and ultimately leads to striatal neurodegeneration which progresses to widespread brain atrophy. Symptoms typically appear between the ages of 35-44 and the average life expectancy subsequent to disease onset is 10-25 years. Interestingly, the length of the CAG expansion correlates with both age of onset and rate of disease progression, with longer expansions linked to greater severity of disease and shorter survival. In a small percentage of the HD population (˜6%), disease onset occurs from 2-20 years of age with appearance of an akinetic-rigid syndrome. These cases tend to progress faster than those of the later onset variety and have been classified as juvenile or Westphal variant HD. It is estimated that approximately 35,000-70,000 patients are currently suffering from HD in the US and Europe. Currently, only symptomatic relief and supportive therapies are available for treatment of HD, with a cure yet to be identified. Ultimately, individuals with HD succumb to other diseases (e.g., pneumonia, heart failure), choking, suffocation or other complications such as physical injury from falls.

[0005] The mechanisms by which CAG repeat-expanded htt results in neurotoxicity are not well understood. Huntingtin protein is expressed in all cells, though its concentration is highest in the brain. The normal function of HTT is unknown, but in the brains of HD patients, HTT aggregates into abnormal nuclear inclusions. It is now believed that it is this process of misfolding and aggregating along with the associated protein intermediates (i.e. the soluble species and toxic N-terminal fragments) that result in neurotoxicity.

[0006] Studies in animal models of HD have suggested that phenotypic reversal is feasible, for example, subsequent to gene shut off in regulated-expression models. Further, animal models in which silencing of HTT was tested, demonstrated promising results with the therapy being both well tolerated and showing potential therapeutic benefit. These findings indicate that HTT silencing may serve as a potential therapeutic target for treatment of HD.

[0007] The present invention develops an RNA interference based approach, novel double stranded RNA (dsRNA) constructs and siRNA constructs and methods of their design, to inhibit or prevent the expression of polyglutamine expanded HTT in HD patients for treatment of the disease. In addition, these novel siRNA constructs may be synthetic molecules or be encoded in an expression vector (one or both strands) for delivery into cells. Such vectors include, but are not limited to adeno-associated viral vectors such as vector genomes of any of the AAV serotypes or other viral delivery vehicles such as lentivirus, etc.

### SUMMARY OF THE INVENTION

[0008] The present invention relates to RNA molecule-mediated gene specific interference with gene expression and protein production. Methods for treating neurodegenerative diseases such as Huntington's Disease are also included in the present invention. The siRNAs included in the compositions featured herein encompass a dsRNA having an antisense strand (that is 30 nucleotides or less, generally 19-24 nucleotides in length), that is substantially complementary to at least part of an mRNA transcript of the mutated HTT gene.

[0009] The present invention provides short double stranded RNA molecules such as small interfering RNA (siRNA) duplexes that target HTT mRNA to interfere with HTT gene expression and/or HTT protein production. The siRNA duplexes of the present invention may interfere with the HTT gene, and may particularly interact with the HTT gene which has mutations to cause Huntington's Disease.

[0010] In some embodiments, such siRNA molecules, or a single strand of the siRNA molecules, are inserted into (AAV) adeno-associated viral vectors to be introduced into cells, specifically striatal or cortical neurons and/or other surrounding cells in the central nervous system. The AAV vector may comprise sequences encoding 1, 2, 3, 4, or more than 4 siRNA duplexes.

[0011] The siRNA duplex of the present invention comprises an antisense strand and a sense strand hybridized together forming a duplex structure, wherein the antisense strand is complementary to the nucleic acid sequence of the HTT gene, and wherein the sense strand is homologous to the nucleic acid sequence of the HTT gene. In some aspects, the 5′end of the antisense strand has a 5′ phosphate group and the 3′end of the sense strand contains a 3′hydroxyl group. In other aspects, there are none, one or 2 nucleotide overhangs at the 3′end of each strand.

[0012] According to the present invention, each strand of the siRNA duplex targeting the HTT gene is about 19-25 nucleotides in length, preferably about 19 nucleotides, 20 nucleotides, 21 nucleotides, 22 nucleotides, 23 nucleotides, 24 nucleotides, or 25 nucleotides in length. In some aspects, the siRNAs may be unmodified RNA molecules.

[0013] In other aspects, the siRNAs may contain at least one modified nucleotide, such as base, sugar or backbone modification.

[0014] In one embodiment, a siRNA or dsRNA includes at least two sequences that are complementary to each other. The dsRNA includes a sense strand having a first sequence and an antisense strand having a second sequence. The antisense strand includes a nucleotide sequence that is substantially complementary to at least part of an mRNA encoding the HTT protein, and the region of complementarity is 30 nucleotides or less, and at least 15 nucleotides in length. Generally, the dsRNA is 19 to 24, e.g., 19 to 21 nucleotides in length. In some embodiments the dsRNA is from about 15 to about 25 nucleotides in length, and in other embodiments the dsRNA is from about 25 to about 30 nucleotides in length.

[0015] The dsRNA, either upon contacting with a cell expressing HTT protein or upon transcription within a cell expressing HTT protein, inhibits or suppresses the expression of a HTT gene by at least 10%, at least 20%, at least 25%, at least 30%, at least 35% or at least 40% or more, such as when assayed by a method as described herein.

[0016] According to the present invention, AAV vectors comprising the nucleic acids encoding the siRNA duplexes, one strand of the siRNA duplex or the dsRNA targeting the HTT gene are produced, the AAV vector serotype may be AAV1, AAV2, AAV3, AAV4, AAV5, AAV6, AAV7, AAV8, AAV9, AAV9.47, AAV9 (hu14), AAV10, AAV11, AAV12, AAVrh8, AAVrh10, AAV-DJ8, AAV-DJ, AAV-PHP.A (PHP.A), and/or AAV-PHP.B (PHP.B), and variants thereof. As a non-limiting example, the AAV vector serotype is AAV1. As another non-limiting example, the AAV serotype is AAV-DJ8. As another non-limiting example, the AAV serotype is AAV-PHP.A (PHP.A). As another non-limiting example, the AAV serotype is AAV-PHP.B (PHP.B).

[0017] In one embodiment, the AAV vectors comprising the nucleic acids encoding the siRNA duplexes, one strand of the siRNA duplex or the dsRNA targeting the HTT gene are produced may be selected based on the tropism for medium spiny striatal neurons, cortical neurons and/or astrocytes. As a non-limiting example, the AAV vector is selected based on the expression level in a desired cell type such as, but not limited to, medium spiny striatal neurons, cortical neurons and/or astrocytes.

[0018] According to the present invention, siRNA duplexes or dsRNA targeting the HTT gene in HD are selected from the siRNA duplexes listed in Tables 3, 4, or 5. Preferably, the siRNA duplexes or dsRNA targeting HTT gene in HD are selected from the group consisting of siRNA duplexes: D-3500 to D-3570.

[0019] The present invention also provides pharmaceutical compositions comprising at least one siRNA duplex targeting the HTT gene and a pharmaceutically acceptable carrier. In some aspects, a nucleic acid sequence encoding the siRNA duplex is inserted into an AAV vector.

[0020] In some embodiments, the present invention provides methods for inhibiting/silencing HTT gene expression in a cell. Accordingly, the siRNA duplexes or dsRNA can be used to substantially inhibit HTT gene expression in a cell. The cell may be a neuron (e.g., medium spiny neurons of the putamen, caudate or striatum, and cortical neurons in the cerebral cortex), an astrocyte (e.g., astrocyte in the striatum, cortical astrocytes in the cerebral cortex) and/or oligodendrocytes. As a non-limiting example, the inhibition (or lowering) of the HTT gene expression in the putamen, caudate and cortex reduces the effect of Huntington's Disease in a subject. As another non-limiting example, the inhibition (or lowering) of the HTT gene expression in the medium spiny neurons in the striatum reduces the effect of Huntington's Disease in a subject. As yet another non-limiting example, the inhibition (or lowering) of the HTT gene expression in the astrocytes in the striatum reduces the effect of Huntington's Disease in a subject. In some aspects, the inhibition of the HTT gene expression refers to an inhibition or lowering by at least about 20%, preferably by at least about 30%, 40%, 50%, 60%, 70%, 80%, 85%, 90%, 95% and 100%. Accordingly, the protein product of the targeted gene may be inhibited by at least about 20%, preferably by at least about 30%, 40%, 50%, 60%, 70%, 80%, 85%, 90%, 95% and 100%.

[0021] In one embodiment, the present invention provides methods for inhibiting/silencing HTT gene expression by at least about 40% in a cell using siRNA duplexes or dsRNA. The cell may be a neuron (e.g., medium spiny neurons of the putamen or striatum, and cortical neurons in the cerebral cortex), an astrocyte (e.g., astrocyte in the striatum, cortical astrocytes in the cerebral cortex) and/or oligodendrocytes. As a non-limiting example, the at least 40% inhibition (or lowering) of the HTT gene expression in the putamen and cortex reduces the effect of Huntington's Disease in a subject. As another non-limiting example, the at least 40% inhibition (or lowering) of the HTT gene expression in the medium spiny neurons in the striatum reduces the effect of Huntington's Disease in a subject. As another non-limiting example, the at least 40% inhibition (or lowering) of the HTT gene expression in the putamen and the at least 20% inhibition (or lowering) of the HTT gene expression in the cortex reduces the effect of Huntington's Disease in a subject. As yet another non-limiting example, the at least 40% inhibition (or lowering) of the HTT gene expression in the astrocytes in the striatum reduces the effect of Huntington's Disease in a subject.

[0022] In some embodiments, the present invention provides methods for treating, or ameliorating Huntington's Disease associated with the HTT gene (e.g., CAG-expanded HTT gene) and the resultant HTT protein (e.g., poly-Q protein) in a subject in need of treatment, the method comprising administering to the subject a pharmaceutically effective amount of at least one siRNA duplex targeting the HTT gene (e.g., CAG-expanded HTT gene), delivering said siRNA duplex into targeted cells, inhibiting the HTT gene (e.g., CAG-expanded HTT gene) expression and resultant protein production, and ameliorating symptoms of HD in the subject.

[0023] In some embodiments, an AAV vector comprising the nucleic acid sequence encoding at least one siRNA duplex targeting the HTT gene is administered to the subject in need for treating and/or ameliorating HD. The AAV vector serotype may be selected from the group consisting of AAV1, AAV2, AAV3, AAV4, AAV5, AAV6, AAV7, AAV8, AAV9, AAV9.47, AAV9 (hu14), AAV10, AAV11, AAV12, AAVrh8, AAVrh10, AAV-DJ8, AAV-DJ, AAV-PHP.A (PHP.A), and/or AAV-PHP.B (PHP.B) and variants thereof.

[0024] In some embodiments, the siRNA duplexes or dsRNA targeting HTT gene or the AAV vectors comprising such siRNA-encoding molecules may be introduced directly into the central nervous system of the subject, for example, by intracranial injection.

[0025] In some embodiments, the pharmaceutical composition of the present invention is used as a solo therapy. In other embodiments, the pharmaceutical composition of the present invention is used in combination therapy. The combination therapy may be in combination with one or more neuroprotective agents such as small molecule compounds, growth factors and hormones which have been tested for their neuroprotective effect on neuron degeneration.

[0026] In some embodiments, the present invention provides methods for treating, or ameliorating Huntington's Disease by administering to a subject in need thereof a therapeutically effective amount of a plasmid or AAV vector described herein.

[0027] In some embodiments, the present invention provides a method for inhibiting the expression of the HTT gene in a region of the central nervous system of a subject by administering to the subject a composition with at least one adeno-associated viral (AAV) vector with a nucleic acid sequence positioned between two inverted terminal repeats (ITRs). The nucleic acid sequence position between two inverted terminal repeats (ITRs) may include an antisense strand and a sense strand which may form a siRNA duplex that when expressed inhibits or suppresses the expression of HTT in the subject. The expression may be reduced in a region of the subject such as, but not limited to, the forebrain of a subject or a region of the forebrain such as, but not limited to, the putamen. The expression of HTT in the forebrain or region of the forebrain (e.g., putamen) may be reduced by 40-70%, 40-60%, 50-70%, 50-60%, or it may be reduced by 50%, 51%, 52%, 53%, 54%, 55%, 56%, 57%, 58%, 59%, or 60%.

[0028] In some embodiments, the present invention provides a method for treating Huntington's Disease (HD) in a subject in need of treatment. The method may inhibit the expression of the HTT gene in a region of the central nervous system of a subject comprising administering to the subject a composition comprising at least one adeno-associated viral (AAV) vector comprising a nucleic acid sequence positioned between two inverted terminal repeats (ITRs). The nucleic acid sequence may comprise an antisense strand and a sense strand which can form a siRNA duplex that when expressed inhibits or suppresses the expression of HTT in a said subject. The expression may be reduced in a region of the subject such as, but not limited to, the forebrain of a subject or a region of the forebrain such as, but not limited to, the putamen. The expression of HTT in the forebrain or region of the forebrain (e.g., putamen) may be reduced by 40-70%, 40-60%, 50-70%, 50-60%, or it may be reduced by 50%, 51%, 52%, 53%, 54%, 55%, 56%, 57%, 58%, 59%, or 60%.

### DETAILED DESCRIPTION OF THE INVENTION

[0029] The present invention relates to modulatory polynucleotides, e.g., RNA or DNA molecules as therapeutic agents. RNA interference mediated gene silencing can specifically inhibit targeted gene expression. As used herein, a “modulatory polynucleotide” is any nucleic acid sequence(s) which functions to modulate (either increase or decrease) the level or amount of a target gene, e.g., mRNA or protein levels. The present invention then provides small double stranded RNA (dsRNA) molecules (small interfering RNA, siRNA) targeting the HTT gene, pharmaceutical compositions comprising such siRNAs, as well as processes of their design. The present invention also provides methods of their use for inhibiting HTT gene expression and protein production, for treating neurodegenerative disease, in particular, Huntington's Disease (HD).

[0030] The present invention provides small interfering RNA (siRNA) duplexes (and modulatory polynucleotides encoding them) that target HTT mRNA to interfere with HTT gene expression and/or HTT protein production.

[0031] In some embodiments, a nucleic acid sequence encoding such siRNA molecules, or a single strand of the siRNA molecules, is inserted into adeno-associated viral vectors and introduced into cells, specifically neurons and/or other surrounding cells in the central nervous system.

[0032] The encoded siRNA duplex of the present invention contains an antisense strand and a sense strand hybridized together forming a duplex structure, wherein the antisense strand is complementary to the nucleic acid sequence of the targeted HTT gene, and wherein the sense strand is homologous to the nucleic acid sequence of the targeted HTT gene. In some aspects, the 5′end of the antisense strand has a 5′ phosphate group and the 3′end of the sense strand contains a 3′hydroxyl group. In other aspects, there are none, one or 2 nucleotide overhangs at the 3′end of each strand.

[0033] According to the present invention, each strand of the siRNA duplex targeting the HTT gene is about 19 to 25, 19 to 24 or 19 to 21 nucleotides in length, preferably about 19 nucleotides, 20 nucleotides, 21 nucleotides, 22 nucleotides, 23 nucleotides, 24 nucleotides, or 25 nucleotides in length. In some aspects, the siRNAs may be unmodified RNA molecules.

[0034] In other aspects, the siRNAs may contain at least one modified nucleotide, such as base, sugar or backbone modification.

[0035] In one embodiment, a siRNA or dsRNA includes at least two sequences that are complementary to each other. The dsRNA includes a sense strand having a first sequence and an antisense strand having a second sequence. The antisense strand includes a nucleotide sequence that is substantially complementary to at least part of an mRNA encoding HTT, and the region of complementarity is 30 nucleotides or less, and at least 15 nucleotides in length. Generally, the dsRNA is 19 to 25, 19 to 24 or 19 to 21 nucleotides in length. In some embodiments the dsRNA is from about 15 to about 25 nucleotides in length, and in other embodiments the dsRNA is from about 25 to about 30 nucleotides in length.

[0036] The dsRNA, whether directly administered or encoded in an expression vector upon contacting with a cell expressing HTT protein, inhibits the expression of HTT protein by at least 10%, at least 20%, at least 25%, at least 30%, at least 35% or at least 40% or more, such as when assayed by a method as described herein.

[0037] The siRNA molecules included in the compositions featured herein comprise a dsRNA having an antisense strand (the antisense strand) having a region that is 30 nucleotides or less, generally 19 to 25, 19 to 24 or 19 to 21 nucleotides in length, that is substantially complementary to at least part of a mRNA transcript of the HTT gene.

[0038] According to the present invention, AAV vectors comprising the nucleic acids of the siRNA duplexes, one strand of the siRNA duplex or the dsRNA targeting HTT gene are produced, where the AAV vector serotypes may be AAV1, AAV2, AAV3, AAV4, AAV5, AAV6, AAV7, AAV8, AAV9, AAV9.47, AAV9 (hu14), AAV10, AAV11, AAV12, AAVrh8, AAVrh10, AAV-DJ8, AAV-DJ, AAV-PHP.A (PHP.A), and/or AAV-PHP.B (PHP.B) and variants thereof.

[0039] According to the present invention, siRNA duplexes or the encoded dsRNA targeting the HTT gene in HD is selected from the siRNA duplexes listed in Table 7 or Table 8. In some embodiments, the siRNA duplexes or dsRNA targeting the HTT in HD is D-3500 to D-3570.

[0040] The present invention also provides pharmaceutical compositions comprising at least one siRNA duplex targeting the HTT gene and a pharmaceutically acceptable carrier. In some aspects, the siRNA duplex is encoded by an AAV vector.

[0041] In some embodiments, the present invention provides methods for inhibiting/silencing HTT gene expression in a cell. Accordingly, the siRNA duplexes or encoded dsRNA can be used to substantially inhibit HTT gene expression in a cell, in particular in a neuron. In some aspects, the inhibition of HTT gene expression refers to an inhibition by at least about 15%, such as by at least about 16%, 17%, 18%, 19%, 20%, 21%, 22%, 23%, 24%, 25%, 26%, 27%, 28%, 29%, 30%, 31%, 32%, 33%, 34%, 35%, 36%, 37%, 38%, 39%, 40%, 41%, 42%, 43%, 44%, 45%, 46%, 47%, 48%, 49%, 50%, 51%, 52%, 53%, 54%, 55%, 56%, 57%, 58%, 59%, 60%, 61%, 62%, 63%, 64%, 65%, 66%, 67%, 68%, 69%, 70%, 71%, 72%, 73%, 74%, 75%, 76%, 77%, 78%, 79%, 80%, 85%, 90%, 95% and 100%, or at least 15-20%, 15-30%, 15-40%, 15-50%, 15-60%, 15-70%, 15-80%, 15-90%, 15-95%, 20-30%, 20-40%, 20-50%, 20-60%, 20-70%, 20-80%, 20-90%, 20-95%, 20-100%, 30-40%, 30-50%, 30-60%, 30-70%, 30-80%, 30-90%, 30-95%, 30-100%, 40-50%, 40-60%, 40-70%, 40-80%, 40-90%, 40-95%, 40-100%, 50-60%, 50-70%, 50-80%, 50-90%, 50-95%, 50-100%, 55-60%, 55-70%, 55-80%, 55-90%, 55-95%, 55-100%, 60-70%, 60-80%, 60-90%, 60-95%, 60-100%, 70-80%, 70-90%, 70-95%, 70-100%, 80-90%, 80-95%, 80-100%, 90-95%, 90-100% or 95-100%. Accordingly, the protein product of the targeted gene may be inhibited by at least about 15%, preferably by at least about 16%, 17%, 18%, 19%, 20%, 21%, 22%, 23%, 24%, 25%, 26%, 27%, 28%, 29%, 30%, 31%, 32%, 33%, 34%, 35%, 36%, 37%, 38%, 39%, 40%, 41%, 42%, 43%, 44%, 45%, 46%, 47%, 48%, 49%, 50%, 51%, 52%, 53%, 54%, 55%, 56%, 57%, 58%, 59%, 60%, 61%, 62%, 63%, 64%, 65%, 66%, 67%, 68%, 69%, 70%, 71%, 72%, 73%, 74%, 75%, 76%, 77%, 78%, 79%, 80%, 85%, 90%, 95% and 100%, or at least 15-20%, 15-30%, 15-40%, 15-50%, 15-60%, 15-70%, 15-80%, 15-90%, 15-95%, 20-30%, 20-40%, 20-50%, 20-60%, 20-70%, 20-80%, 20-90%, 20-95%, 20-100%, 30-40%, 30-50%, 30-60%, 30-70%, 30-80%, 30-90%, 30-95%, 30-100%, 40-50%, 40-60%, 40-70%, 40-80%, 40-90%, 40-95%, 40-100%, 50-60%, 50-70%, 50-80%, 50-90%, 50-95%, 50-100%, 60-70%, 60-80%, 60-90%, 60-95%, 60-100%, 70-80%, 70-90%, 70-95%, 70-100%, 80-90%, 80-95%, 80-100%, 90-95%, 90-100% or 95-100%.

[0042] In some embodiments, the present invention provides methods for inhibiting/silencing HTT gene expression in a cell, in particular in a medium spiny neuron. In some aspects, the inhibition of HTT gene expression refers to an inhibition by at least about 15%, such as by at least about 16%, 17%, 18%, 19%, 20%, 21%, 22%, 23%, 24%, 25%, 26%, 27%, 28%, 29%, 30%, 31%, 32%, 33%, 34%, 35%, 36%, 37%, 38%, 39%, 40%, 41%, 42%, 43%, 44%, 45%, 46%, 47%, 48%, 49%, 50%, 51%, 52%, 53%, 54%, 55%, 56%, 57%, 58%, 59%, 60%, 61%, 62%, 63%, 64%, 65%, 66%, 67%, 68%, 69%, 70%, 71%, 72%, 73%, 74%, 75%, 76%, 77%, 78%, 79%, 80%, 85%, 90%, 95% and 100%, or at least 15-20%, 15-30%, 15-40%, 15-50%, 15-60%, 15-70%, 15-80%, 15-90%, 15-95%, 20-30%, 20-40%, 20-50%, 20-60%, 20-70%, 20-80%, 20-90%, 20-95%, 20-100%, 30-40%, 30-50%, 30-60%, 30-70%, 30-80%, 30-90%, 30-95%, 30-100%, 40-50%, 40-60%, 40-70%, 40-80%, 40-90%, 40-95%, 40-100%, 50-60%, 50-70%, 50-80%, 50-90%, 50-95%, 50-100%, 55-60%, 55-70%, 55-80%, 55-90%, 55-95%, 55-100%, 60-70%, 60-80%, 60-90%, 60-95%, 60-100%, 70-80%, 70-90%, 70-95%, 70-100%, 80-90%, 80-95%, 80-100%, 90-95%, 90-100% or 95-100%. Accordingly, the protein product of the targeted gene may be inhibited by at least about 15%, preferably by at least about 16%, 17%, 18%, 19%, 20%, 21%, 22%, 23%, 24%, 25%, 26%, 27%, 28%, 29%, 30%, 31%, 32%, 33%, 34%, 35%, 36%, 37%, 38%, 39%, 40%, 41%, 42%, 43%, 44%, 45%, 46%, 47%, 48%, 49%, 50%, 51%, 52%, 53%, 54%, 55%, 56%, 57%, 58%, 59%, 60%, 61%, 62%, 63%, 64%, 65%, 66%, 67%, 68%, 69%, 70%, 71%, 72%, 73%, 74%, 75%, 76%, 77%, 78%, 79%, 80%, 85%, 90%, 95% and 100%, or at least 15-20%, 15-30%, 15-40%, 15-50%, 15-60%, 15-70%, 15-80%, 15-90%, 15-95%, 20-30%, 20-40%, 20-50%, 20-60%, 20-70%, 20-80%, 20-90%, 20-95%, 20-100%, 30-40%, 30-50%, 30-60%, 30-70%, 30-80%, 30-90%, 30-95%, 30-100%, 40-50%, 40-60%, 40-70%, 40-80%, 40-90%, 40-95%, 40-100%, 50-60%, 50-70%, 50-80%, 50-90%, 50-95%, 50-100%, 55-60%, 55-70%, 55-80%, 55-90%, 55-95%, 55-100%, 60-70%, 60-80%, 60-90%, 60-95%, 60-100%, 70-80%, 70-90%, 70-95%, 70-100%, 80-90%, 80-95%, 80-100%, 90-95%, 90-100% or 95-100%.

[0043] In some embodiments, the present invention provides methods for inhibiting/silencing gene expression in a cell, in particular in a motor neuron. In some aspects, the inhibition of gene expression refers to an inhibition by at least about 15%, such as by at least about 16%, 17%, 18%, 19%, 20%, 21%, 22%, 23%, 24%, 25%, 26%, 27%, 28%, 29%, 30%, 31%, 32%, 33%, 34%, 35%, 36%, 37%, 38%, 39%, 40%, 41%, 42%, 43%, 44%, 45%, 46%, 47%, 48%, 49%, 50%, 51%, 52%, 53%, 54%, 55%, 56%, 57%, 58%, 59%, 60%, 61%, 62%, 63%, 64%, 65%, 66%, 67%, 68%, 69%, 70%, 71%, 72%, 73%, 74%, 75%, 76%, 77%, 78%, 79%, 80%, 85%, 90%, 95% and 100%, or at least 15-20%, 15-30%, 15-40%, 15-50%, 15-60%, 15-70%, 15-80%, 15-90%, 15-95%, 20-30%, 20-40%, 20-50%, 20-60%, 20-70%, 20-80%, 20-90%, 20-95%, 20-100%, 30-40%, 30-50%, 30-60%, 30-70%, 30-80%, 30-90%, 30-95%, 30-100%, 40-50%, 40-60%, 40-70%, 40-80%, 40-90%, 40-95%, 40-100%, 50-60%, 50-70%, 50-80%, 50-90%, 50-95%, 50-100%, 55-60%, 55-70%, 55-80%, 55-90%, 55-95%, 55-100%, 60-70%, 60-80%, 60-90%, 60-95%, 60-100%, 70-80%, 70-90%, 70-95%, 70-100%, 80-90%, 80-95%, 80-100%, 90-95%, 90-100% or 95-100%. Accordingly, the protein product of the targeted gene may be inhibited by at least about 15%, preferably by at least about 16%, 17%, 18%, 19%, 20%, 21%, 22%, 23%, 24%, 25%, 26%, 27%, 28%, 29%, 30%, 31%, 32%, 33%, 34%, 35%, 36%, 37%, 38%, 39%, 40%, 41%, 42%, 43%, 44%, 45%, 46%, 47%, 48%, 49%, 50%, 51%, 52%, 53%, 54%, 55%, 56%, 57%, 58%, 59%, 60%, 61%, 62%, 63%, 64%, 65%, 66%, 67%, 68%, 69%, 70%, 71%, 72%, 73%, 74%, 75%, 76%, 77%, 78%, 79%, 80%, 85%, 90%, 95% and 100%, or at least 15-20%, 15-30%, 15-40%, 15-50%, 15-60%, 15-70%, 15-80%, 15-90%, 15-95%, 20-30%, 20-40%, 20-50%, 20-60%, 20-70%, 20-80%, 20-90%, 20-95%, 20-100%, 30-40%, 30-50%, 30-60%, 30-70%, 30-80%, 30-90%, 30-95%, 30-100%, 40-50%, 40-60%, 40-70%, 40-80%, 40-90%, 40-95%, 40-100%, 50-60%, 50-70%, 50-80%, 50-90%, 50-95%, 50-100%, 55-60%, 55-70%, 55-80%, 55-90%, 55-95%, 55-100%, 60-70%, 60-80%, 60-90%, 60-95%, 60-100%, 70-80%, 70-90%, 70-95%, 70-100%, 80-90%, 80-95%, 80-100%, 90-95%, 90-100% or 95-100%.

[0044] In some embodiments, the present invention provides methods for inhibiting/silencing HTT gene expression in a cell, in particular in an astrocyte. In some aspects, the inhibition of HTT gene expression refers to an inhibition by at least about 15%, such as by at least about 16%, 17%, 18%, 19%, 20%, 21%, 22%, 23%, 24%, 25%, 26%, 27%, 28%, 29%, 30%, 31%, 32%, 33%, 34%, 35%, 36%, 37%, 38%, 39%, 40%, 41%, 42%, 43%, 44%, 45%, 46%, 47%, 48%, 49%, 50%, 51%, 52%, 53%, 54%, 55%, 56%, 57%, 58%, 59%, 60%, 61%, 62%, 63%, 64%, 65%, 66%, 67%, 68%, 69%, 70%, 71%, 72%, 73%, 74%, 75%, 76%, 77%, 78%, 79%, 80%, 85%, 90%, 95% and 100%, or at least 15-20%, 15-30%, 15-40%, 15-50%, 15-60%, 15-70%, 15-80%, 15-90%, 15-95%, 20-30%, 20-40%, 20-50%, 20-60%, 20-70%, 20-80%, 20-90%, 20-95%, 20-100%, 30-40%, 30-50%, 30-60%, 30-70%, 30-80%, 30-90%, 30-95%, 30-100%, 40-50%, 40-60%, 40-70%, 40-80%, 40-90%, 40-95%, 40-100%, 50-60%, 50-70%, 50-80%, 50-90%, 50-95%, 50-100%, 55-60%, 55-70%, 55-80%, 55-90%, 55-95%, 55-100%, 60-70%, 60-80%, 60-90%, 60-95%, 60-100%, 70-80%, 70-90%, 70-95%, 70-100%, 80-90%, 80-95%, 80-100%, 90-95%, 90-100% or 95-100%. Accordingly, the protein product of the targeted gene may be inhibited by at least about 15%, preferably by at least about 16%, 17%, 18%, 19%, 20%, 21%, 22%, 23%, 24%, 25%, 26%, 27%, 28%, 29%, 30%, 31%, 32%, 33%, 34%, 35%, 36%, 37%, 38%, 39%, 40%, 41%, 42%, 43%, 44%, 45%, 46%, 47%, 48%, 49%, 50%, 51%, 52%, 53%, 54%, 55%, 56%, 57%, 58%, 59%, 60%, 61%, 62%, 63%, 64%, 65%, 66%, 67%, 68%, 69%, 70%, 71%, 72%, 73%, 74%, 75%, 76%, 77%, 78%, 79%, 80%, 85%, 90%, 95% and 100%, or at least 15-20%, 15-30%, 15-40%, 15-50%, 15-60%, 15-70%, 15-80%, 15-90%, 15-95%, 20-30%, 20-40%, 20-50%, 20-60%, 20-70%, 20-80%, 20-90%, 20-95%, 20-100%, 30-40%, 30-50%, 30-60%, 30-70%, 30-80%, 30-90%, 30-95%, 30-100%, 40-50%, 40-60%, 40-70%, 40-80%, 40-90%, 40-95%, 40-100%, 50-60%, 50-70%, 50-80%, 50-90%, 50-95%, 50-100%, 55-60%, 55-70%, 55-80%, 55-90%, 55-95%, 55-100%, 60-70%, 60-80%, 60-90%, 60-95%, 60-100%, 70-80%, 70-90%, 70-95%, 70-100%, 80-90%, 80-95%, 80-100%, 90-95%, 90-100% or 95-100%.

[0045] In one embodiment, the siRNA duplexes or encoded dsRNA may be used to reduce the expression of HTT protein by at least about 15%, 16%, 17%, 18%, 19%, 20%, 21%, 22%, 23%, 24%, 25%, 26%, 27%, 28%, 29%, 30%, 31%, 32%, 33%, 34%, 35%, 36%, 37%, 38%, 39%, 40%, 41%, 42%, 43%, 44%, 45%, 46%, 47%, 48%, 49%, 50%, 51%, 52%, 53%, 54%, 55%, 56%, 57%, 58%, 59%, 60%, 61%, 62%, 63%, 64%, 65%, 66%, 67%, 68%, 69%, 70%, 71%, 72%, 73%, 74%, 75%, 76%, 77%, 78%, 79%, 80%, 85%, 90%, 95% and 100%, or at least 15-20%, 15-30%, 15-40%, 15-50%, 15-60%, 15-70%, 15-80%, 15-90%, 15-95%, 20-30%, 20-40%, 20-50%, 20-60%, 20-70%, 20-80%, 20-90%, 20-95%, 20-100%, 30-40%, 30-50%, 30-60%, 30-70%, 30-80%, 30-90%, 30-95%, 30-100%, 40-50%, 40-60%, 40-70%, 40-80%, 40-90%, 40-95%, 40-100%, 50-60%, 50-70%, 50-80%, 50-90%, 50-95%, 50-100%, 55-60%, 55-70%, 55-80%, 55-90%, 55-95%, 55-100%, 60-70%, 60-80%, 60-90%, 60-95%, 60-100%, 70-80%, 70-90%, 70-95%, 70-100%, 80-90%, 80-95%, 80-100%, 90-95%, 90-100% or 95-100%. As a non-limiting example, the expression of HTT protein may be reduced by 50-90%. As a non-limiting example, the expression of HTT protein may be reduced by 30-70%. As a non-limiting example, the expression of protein may be reduced by 20-70%. As a non-limiting example, the expression of protein may be reduced by 15-30%.

[0046] In one embodiment, the siRNA duplexes or encoded dsRNA may be used to reduce the expression of HTT mRNA by at least about 15%, 16%, 17%, 18%, 19%, 20%, 21%, 22%, 23%, 24%, 25%, 26%, 27%, 28%, 29%, 30%, 31%, 32%, 33%, 34%, 35%, 36%, 37%, 38%, 39%, 40%, 41%, 42%, 43%, 44%, 45%, 46%, 47%, 48%, 49%, 50%, 51%, 52%, 53%, 54%, 55%, 56%, 57%, 58%, 59%, 60%, 61%, 62%, 63%, 64%, 65%, 66%, 67%, 68%, 69%, 70%, 71%, 72%, 73%, 74%, 75%, 76%, 77%, 78%, 79%, 80%, 85%, 90%, 95% and 100%, or at least 15-20%, 15-30%, 15-40%, 15-50%, 15-60%, 15-70%, 15-80%, 15-90%, 15-95%, 20-30%, 20-40%, 20-50%, 20-60%, 20-70%, 20-80%, 20-90%, 20-95%, 20-100%, 30-40%, 30-50%, 30-60%, 30-70%, 30-80%, 30-90%, 30-95%, 30-100%, 40-50%, 40-60%, 40-70%, 40-80%, 40-90%, 40-95%, 40-100%, 50-60%, 50-70%, 50-80%, 50-90%, 50-95%, 50-100%, 55-60%, 55-70%, 55-80%, 55-90%, 55-95%, 55-100%, 60-70%, 60-80%, 60-90%, 60-95%, 60-100%, 70-80%, 70-90%, 70-95%, 70-100%, 80-90%, 80-95%, 80-100%, 90-95%, 90-100% or 95-100%. As a non-limiting example, the expression of HTT mRNA may be reduced by 50-90%. As a non-limiting example, the expression of HTT mRNA may be reduced by 30-70%. As a non-limiting example, the expression of HTT mRNA may be reduced by 20-70%. As a non-limiting example, the expression of HTT mRNA may be reduced by 15-30%.

[0047] In one embodiment, the siRNA duplexes or encoded dsRNA may be used to reduce the expression of HTT protein and/or mRNA in at least one region of the CNS such as, but not limited to the midbrain. The expression of HTT protein and/or mRNA is reduced by at least about 15%, 16%, 17%, 18%, 19%, 20%, 21%, 22%, 23%, 24%, 25%, 26%, 27%, 28%, 29%, 30%, 31%, 32%, 33%, 34%, 35%, 36%, 37%, 38%, 39%, 40%, 41%, 42%, 43%, 44%, 45%, 46%, 47%, 48%, 49%, 50%, 51%, 52%, 53%, 54%, 55%, 56%, 57%, 58%, 59%, 60%, 61%, 62%, 63%, 64%, 65%, 66%, 67%, 68%, 69%, 70%, 71%, 72%, 73%, 74%, 75%, 76%, 77%, 78%, 79%, 80%, 85%, 90%, 95% and 100%, or at least 15-20%, 15-30%, 15-40%, 15-50%, 15-60%, 15-70%, 15-80%, 15-90%, 15-95%, 20-30%, 20-40%, 20-50%, 20-60%, 20-70%, 20-80%, 20-90%, 20-95%, 20-100%, 30-40%, 30-50%, 30-60%, 30-70%, 30-80%, 30-90%, 30-95%, 30-100%, 40-50%, 40-60%, 40-70%, 40-80%, 40-90%, 40-95%, 40-100%, 50-60%, 50-70%, 50-80%, 50-90%, 50-95%, 50-100%, 55-60%, 55-70%, 55-80%, 55-90%, 55-95%, 55-100%, 60-70%, 60-80%, 60-90%, 60-95%, 60-100%, 70-80%, 70-90%, 70-95%, 70-100%, 80-90%, 80-95%, 80-100%, 90-95%, 90-100% or 95-100% in at least one region of the CNS. As a non-limiting example, the expression of HTT protein and mRNA in the striatum and/or cortex is reduced by 50-90%. As a non-limiting example, the expression of HTT protein and mRNA in the striatum is reduced by 40-50%. As a non-limiting example, the expression of HTT protein and mRNA in the striatum is reduced by 20-50%. As a non-limiting example, the expression of HTT protein and mRNA in the striatum is reduced by 15-50%. As a non-limiting example, the expression of HTT protein and mRNA in the cortex is reduced by 40-50%. As a non-limiting example, the expression of HTT protein and mRNA in the cortex is reduced by 30-70%. As a non-limiting example, the expression of HTT protein and mRNA in the cortex is reduced by 20-70%. As a non-limiting example, the expression of protein and mRNA in the cortex is reduced by 15-70%. As a non-limiting example, the expression of protein and mRNA in the cortex is reduced by 20-70%. As a non-limiting example, the expression of protein and mRNA in the striatum and/or cortex is reduced by 15-70%. As a non-limiting example, the expression of HTT protein and mRNA in the striatum and/or cortex is reduced by 40-70%. As a non-limiting example, the expression of HTT protein and mRNA in the striatum and/or cortex is reduced by 40-50%. As a non-limiting example, the expression of HTT protein and mRNA in the striatum and/or cortex is reduced by 50-70%. As a non-limiting example, the expression of HTT protein and mRNA in the striatum and/or cortex is reduced by 50-60%. As a non-limiting example, the expression of HTT protein and mRNA in the striatum and/or cortex is reduced by 50%. As a non-limiting example, the expression of HTT protein and mRNA in the striatum and/or cortex is reduced by 51%. As a non-limiting example, the expression of HTT protein and mRNA in the striatum and/or cortex is reduced by 52%. As a non-limiting example, the expression of HTT protein and mRNA in the striatum and/or cortex is reduced by 53%. As a non-limiting example, the expression of HTT protein and mRNA in the striatum and/or cortex is reduced by 54%. As a non-limiting example, the expression of HTT protein and mRNA in the striatum and/or cortex is reduced by 55%. As a non-limiting example, the expression of HTT protein and mRNA in the striatum and/or cortex is reduced by 56%. As a non-limiting example, the expression of HTT protein and mRNA in the striatum and/or cortex is reduced by 57%. As a non-limiting example, the expression of HTT protein and mRNA in the striatum and/or cortex is reduced by 58%. As a non-limiting example, the expression of HTT protein and mRNA in the striatum and/or cortex is reduced by 59%. As a non-limiting example, the expression of HTT protein and mRNA in the striatum and/or cortex is reduced by 60%.

[0048] In one embodiment, the siRNA duplexes or encoded dsRNA may be used to reduce the expression of HTT protein and/or mRNA in at least one region of the CNS such as, but not limited to the forebrain. The expression of HTT protein and/or mRNA is reduced by at least about 15%, 16%, 17%, 18%, 19%, 20%, 21%, 22%, 23%, 24%, 25%, 26%, 27%, 28%, 29%, 30%, 31%, 32%, 33%, 34%, 35%, 36%, 37%, 38%, 39%, 40%, 41%, 42%, 43%, 44%, 45%, 46%, 47%, 48%, 49%, 50%, 51%, 52%, 53%, 54%, 55%, 56%, 57%, 58%, 59%, 60%, 61%, 62%, 63%, 64%, 65%, 66%, 67%, 68%, 69%, 70%, 71%, 72%, 73%, 74%, 75%, 76%, 77%, 78%, 79%, 80%, 85%, 90%, 95% and 100%, or at least 15-20%, 15-30%, 15-40%, 15-50%, 15-60%, 15-70%, 15-80%, 15-90%, 15-95%, 20-30%, 20-40%, 20-50%, 20-60%, 20-70%, 20-80%, 20-90%, 20-95%, 20-100%, 30-40%, 30-50%, 30-60%, 30-70%, 30-80%, 30-90%, 30-95%, 30-100%, 40-50%, 40-60%, 40-70%, 40-80%, 40-90%, 40-95%, 40-100%, 50-60%, 50-70%, 50-80%, 50-90%, 50-95%, 50-100%, 55-60%, 55-70%, 55-80%, 55-90%, 55-95%, 55-100%, 60-70%, 60-80%, 60-90%, 60-95%, 60-100%, 70-80%, 70-90%, 70-95%, 70-100%, 80-90%, 80-95%, 80-100%, 90-95%, 90-100% or 95-100% in at least one region of the CNS. As a non-limiting example, the expression of HTT protein and mRNA in the putamen is reduced by 50-90%. As a non-limiting example, the expression of HTT protein and mRNA in the striatum is reduced by 40-50%. As a non-limiting example, the expression of HTT protein and mRNA in the cortex is reduced by 40-50%. As a non-limiting example, the expression of HTT protein and mRNA in the cortex is reduced by 30-70%. As a non-limiting example, the expression of HTT protein and mRNA in the cortex is reduced by 20-70%. As a non-limiting example, the expression of protein and mRNA in the cortex is reduced by 15-70%. As a non-limiting example, the expression of protein and mRNA in the striatum and/or cortex is reduced by 15-70%. As a non-limiting example, the expression of protein and mRNA in the striatum and/or cortex is reduced by 20-70%. As a non-limiting example, the expression of HTT protein and mRNA in the striatum and/or cortex is reduced by 40-70%. As a non-limiting example, the expression of HTT protein and mRNA in the striatum and/or cortex is reduced by 40-50%. As a non-limiting example, the expression of HTT protein and mRNA in the striatum and/or cortex is reduced by 50-70%. As a non-limiting example, the expression of HTT protein and mRNA in the striatum and/or cortex is reduced by 50-60%. As a non-limiting example, the expression of HTT protein and mRNA in the striatum and/or cortex is reduced by 50%. As a non-limiting example, the expression of HTT protein and mRNA in the striatum and/or cortex is reduced by 51%. As a non-limiting example, the expression of HTT protein and mRNA in the striatum and/or cortex is reduced by 52%. As a non-limiting example, the expression of HTT protein and mRNA in the striatum and/or cortex is reduced by 53%. As a non-limiting example, the expression of HTT protein and mRNA in the striatum and/or cortex is reduced by 54%. As a non-limiting example, the expression of HTT protein and mRNA in the striatum and/or cortex is reduced by 55%. As a non-limiting example, the expression of HTT protein and mRNA in the striatum and/or cortex is reduced by 56%. As a non-limiting example, the expression of HTT protein and mRNA in the striatum and/or cortex is reduced by 57%. As a non-limiting example, the expression of HTT protein and mRNA in the striatum and/or cortex is reduced by 58%. As a non-limiting example, the expression of HTT protein and mRNA in the striatum and/or cortex is reduced by 59%. As a non-limiting example, the expression of HTT protein and mRNA in the striatum and/or cortex is reduced by 60%. As a non-limiting example, the expression of protein and mRNA in the striatum and/or cortex is reduced by 61%. As a non-limiting example, the expression of protein and mRNA in the striatum and/or cortex is reduced by 62%. As a non-limiting example, the expression of protein and mRNA in the striatum and/or cortex is reduced by 63%. As a non-limiting example, the expression of protein and mRNA in the striatum and/or cortex is reduced by 64%. As a non-limiting example, the expression of protein and mRNA in the striatum and/or cortex is reduced by 65%. As a non-limiting example, the expression of protein and mRNA in the striatum and/or cortex is reduced by 66%. As a non-limiting example, the expression of protein and mRNA in the striatum and/or cortex is reduced by 67%. As a non-limiting example, the expression of protein and mRNA in the striatum and/or cortex is reduced by 68%. As a non-limiting example, the expression of protein and mRNA in the striatum and/or cortex is reduced by 69%. As a non-limiting example, the expression of protein and mRNA in the striatum and/or cortex is reduced by 70%.

[0049] In one embodiment, the siRNA duplexes or encoded dsRNA may be used to reduce the expression of HTT protein and/or mRNA in the putamen. The expression of HTT protein and/or mRNA is reduced by at least about 15%, 16%, 17%, 18%, 19%, 20%, 21%, 22%, 23%, 24%, 25%, 26%, 27%, 28%, 29%, 30%, 31%, 32%, 33%, 34%, 35%, 36%, 37%, 38%, 39%, 40%, 41%, 42%, 43%, 44%, 45%, 46%, 47%, 48%, 49%, 50%, 51%, 52%, 53%, 54%, 55%, 56%, 57%, 58%, 59%, 60%, 61%, 62%, 63%, 64%, 65%, 66%, 67%, 68%, 69%, 70%, 71%, 72%, 73%, 74%, 75%, 76%, 77%, 78%, 79%, 80%, 85%, 90%, 95% and 100%, or at least 15-20%, 15-30%, 15-40%, 15-50%, 15-60%, 15-70%, 15-80%, 15-90%, 15-95%, 20-30%, 20-40%, 20-50%, 20-60%, 20-70%, 20-80%, 20-90%, 20-95%, 20-100%, 30-40%, 30-50%, 30-60%, 30-70%, 30-80%, 30-90%, 30-95%, 30-100%, 40-50%, 40-60%, 40-70%, 40-80%, 40-90%, 40-95%, 40-100%, 50-60%, 50-70%, 50-80%, 50-90%, 50-95%, 50-100%, 55-60%, 55-70%, 55-80%, 55-90%, 55-95%, 55-100%, 60-70%, 60-80%, 60-90%, 60-95%, 60-100%, 70-80%, 70-90%, 70-95%, 70-100%, 80-90%, 80-95%, 80-100%, 90-95%, 90-100% or 95-100% in at least one region of the CNS. As a non-limiting example, the expression of HTT protein and mRNA in the putamen is reduced by 40-70%. As a non-limiting example, the expression of HTT protein and mRNA in the putamen is reduced by 40-50%. As a non-limiting example, the expression of HTT protein and mRNA in the putamen is reduced by 50-70%. As a non-limiting example, the expression of HTT protein and mRNA in the putamen is reduced by 50-60%. As a non-limiting example, the expression of HTT protein and mRNA in the putamen is reduced by 50%. As a non-limiting example, the expression of HTT protein and mRNA in the putamen is reduced by 51%. As a non-limiting example, the expression of HTT protein and mRNA in the putamen is reduced by 52%. As a non-limiting example, the expression of HTT protein and mRNA in the putamen is reduced by 53%. As a non-limiting example, the expression of HTT protein and mRNA in the putamen is reduced by 54%. As a non-limiting example, the expression of HTT protein and mRNA in the putamen is reduced by 55%. As a non-limiting example, the expression of HTT protein and mRNA in the putamen is reduced by 56%. As a non-limiting example, the expression of HTT protein and mRNA in the putamen is reduced by 57%. As a non-limiting example, the expression of HTT protein and mRNA in the putamen is reduced by 58%. As a non-limiting example, the expression of HTT protein and mRNA in the putamen is reduced by 59%. As a non-limiting example, the expression of HTT protein and mRNA in the putamen is reduced by 60%. As a non-limiting example, the expression of protein and mRNA in the putamen is reduced by 61%. As a non-limiting example, the expression of protein and mRNA in the putamen is reduced by 62%. As a non-limiting example, the expression of protein and mRNA in the putamen is reduced by 63%. As a non-limiting example, the expression of protein and mRNA in the putamen is reduced by 64%. As a non-limiting example, the expression of protein and mRNA in the putamen is reduced by 65%. As a non-limiting example, the expression of protein and mRNA in the putamen is reduced by 66%. As a non-limiting example, the expression of protein and mRNA in the putamen is reduced by 67%. As a non-limiting example, the expression of protein and mRNA in the putamen is reduced by 68%. As a non-limiting example, the expression of protein and mRNA in the putamen is reduced by 69%. As a non-limiting example, the expression of protein and mRNA in the putamen is reduced by 70%.

[0050] In one embodiment, the siRNA duplexes or encoded dsRNA may be used to reduce the expression of HTT protein and/or mRNA in the cortex. The expression of HTT protein and/or mRNA is reduced by at least about 15%, 16%, 17%, 18%, 19%, 20%, 21%, 22%, 23%, 24%, 25%, 26%, 27%, 28%, 29%, 30%, 31%, 32%, 33%, 34%, 35%, 36%, 37%, 38%, 39%, 40%, 41%, 42%, 43%, 44%, 45%, 46%, 47%, 48%, 49%, 50%, 51%, 52%, 53%, 54%, 55%, 56%, 57%, 58%, 59%, 60%, 61%, 62%, 63%, 64%, 65%, 66%, 67%, 68%, 69%, 70%, 71%, 72%, 73%, 74%, 75%, 76%, 77%, 78%, 79%, 80%, 85%, 90%, 95% and 100%, or at least 15-20%, 15-30%, 15-40%, 15-50%, 15-60%, 15-70%, 15-80%, 15-90%, 15-95%, 20-30%, 20-40%, 20-50%, 20-60%, 20-70%, 20-80%, 20-90%, 20-95%, 20-100%, 30-40%, 30-50%, 30-60%, 30-70%, 30-80%, 30-90%, 30-95%, 30-100%, 40-50%, 40-60%, 40-70%, 40-80%, 40-90%, 40-95%, 40-100%, 50-60%, 50-70%, 50-80%, 50-90%, 50-95%, 50-100%, 60-70%, 60-80%, 60-90%, 60-95%, 60-100%, 70-80%, 70-90%, 70-95%, 70-100%, 80-90%, 80-95%, 80-100%, 90-95%, 90-100% or 95-100%. As a non-limiting example, the expression of HTT protein and mRNA in the cortex is reduced by 40-50%. As a non-limiting example, the expression of HTT protein and mRNA in the cortex is reduced by 30-70%. As a non-limiting example, the expression of HTT protein and mRNA in the cortex is reduced by 20-70%. As a non-limiting example, the expression of HTT protein and mRNA in the cortex is reduced by 15-70%. As a non-limiting example, the expression of HTT protein and mRNA in the cortex is reduced by at least 30%. As a non-limiting example, the expression of HTT protein and mRNA in the cortex is reduced by 40-70%. As a non-limiting example, the expression of HTT protein and mRNA in the cortex is reduced by 40-50%. As a non-limiting example, the expression of HTT protein and mRNA in the cortex is reduced by 50-70%. As a non-limiting example, the expression of HTT protein and mRNA in the cortex is reduced by 50-60%. As a non-limiting example, the expression of HTT protein and mRNA in the cortex is reduced by 50%. As a non-limiting example, the expression of HTT protein and mRNA in the cortex is reduced by 51%. As a non-limiting example, the expression of HTT protein and mRNA in the cortex is reduced by 52%. As a non-limiting example, the expression of HTT protein and mRNA in the cortex is reduced by 53%. As a non-limiting example, the expression of HTT protein and mRNA in the cortex is reduced by 54%. As a non-limiting example, the expression of HTT protein and mRNA in the cortex is reduced by 55%. As a non-limiting example, the expression of HTT protein and mRNA in the cortex is reduced by 56%. As a non-limiting example, the expression of HTT protein and mRNA in the cortex is reduced by 57%. As a non-limiting example, the expression of HTT protein and mRNA in the cortex is reduced by 58%. As a non-limiting example, the expression of HTT protein and mRNA in the cortex is reduced by 59%. As a non-limiting example, the expression of HTT protein and mRNA in the cortex is reduced by 60%. As a non-limiting example, the expression of protein and mRNA in the cortex is reduced by 61%. As a non-limiting example, the expression of protein and mRNA in the cortex is reduced by 62%. As a non-limiting example, the expression of protein and mRNA in the cortex is reduced by 63%. As a non-limiting example, the expression of protein and mRNA in the cortex is reduced by 64%. As a non-limiting example, the expression of protein and mRNA in the cortex is reduced by 65%. As a non-limiting example, the expression of protein and mRNA in the cortex is reduced by 66%. As a non-limiting example, the expression of protein and mRNA in the cortex is reduced by 67%. As a non-limiting example, the expression of protein and mRNA in the cortex is reduced by 68%. As a non-limiting example, the expression of protein and mRNA in the cortex is reduced by 69%. As a non-limiting example, the expression of protein and mRNA in the cortex is reduced by 70%.

[0051] In one embodiment, the siRNA duplexes or encoded dsRNA may be used to reduce the expression of HTT protein and/or mRNA in the motor cortex. The expression of HTT protein and/or mRNA is reduced by at least about 15%, 16%, 17%, 18%, 19%, 20%, 21%, 22%, 23%, 24%, 25%, 26%, 27%, 28%, 29%, 30%, 31%, 32%, 33%, 34%, 35%, 36%, 37%, 38%, 39%, 40%, 41%, 42%, 43%, 44%, 45%, 46%, 47%, 48%, 49%, 50%, 51%, 52%, 53%, 54%, 55%, 56%, 57%, 58%, 59%, 60%, 61%, 62%, 63%, 64%, 65%, 66%, 67%, 68%, 69%, 70%, 71%, 72%, 73%, 74%, 75%, 76%, 77%, 78%, 79%, 80%, 85%, 90%, 95% and 100%, or at least 15-20%, 15-30%, 15-40%, 15-50%, 15-60%, 15-70%, 15-80%, 15-90%, 15-95%, 20-30%, 20-40%, 20-50%, 20-60%, 20-70%, 20-80%, 20-90%, 20-95%, 20-100%, 30-40%, 30-50%, 30-60%, 30-70%, 30-80%, 30-90%, 30-95%, 30-100%, 40-50%, 40-60%, 40-70%, 40-80%, 40-90%, 40-95%, 40-100%, 50-60%, 50-70%, 50-80%, 50-90%, 50-95%, 50-100%, 60-70%, 60-80%, 60-90%, 60-95%, 60-100%, 70-80%, 70-90%, 70-95%, 70-100%, 80-90%, 80-95%, 80-100%, 90-95%, 90-100% or 95-100%. As a non-limiting example, the expression of HTT protein and mRNA in the motor cortex is reduced by 40-50%. As a non-limiting example, the expression of HTT protein and mRNA in the motor cortex is reduced by 30-70%. As a non-limiting example, the expression of HTT protein and mRNA in the motor cortex is reduced by 20-70%. As a non-limiting example, the expression of HTT protein and mRNA in the motor cortex is reduced by 15-70%. As a non-limiting example, the expression of HTT protein and mRNA in the motor cortex is reduced by at least 30%. As a non-limiting example, the expression of HTT protein and mRNA in the motor cortex is reduced by 40-70%. As a non-limiting example, the expression of HTT protein and mRNA in the motor cortex is reduced by 50-70%. As a non-limiting example, the expression of HTT protein and mRNA in the motor cortex is reduced by 50-60%. As a non-limiting example, the expression of HTT protein and mRNA in the motor cortex is reduced by 50%. As a non-limiting example, the expression of HTT protein and mRNA in the motor cortex is reduced by 51%. As a non-limiting example, the expression of HTT protein and mRNA in the motor cortex is reduced by 52%. As a non-limiting example, the expression of HTT protein and mRNA in the motor cortex is reduced by 53%. As a non-limiting example, the expression of HTT protein and mRNA in the motor cortex is reduced by 54%. As a non-limiting example, the expression of HTT protein and mRNA in the motor cortex is reduced by 55%. As a non-limiting example, the expression of HTT protein and mRNA in the motor cortex is reduced by 56%. As a non-limiting example, the expression of HTT protein and mRNA in the motor cortex is reduced by 57%. As a non-limiting example, the expression of HTT protein and mRNA in the motor cortex is reduced by 58%. As a non-limiting example, the expression of HTT protein and mRNA in the motor cortex is reduced by 59%. As a non-limiting example, the expression of HTT protein and mRNA in the motor cortex is reduced by 60%. As a non-limiting example, the expression of protein and mRNA in the motor cortex is reduced by 61%. As a non-limiting example, the expression of protein and mRNA in the motor cortex is reduced by 62%. As a non-limiting example, the expression of protein and mRNA in the motor cortex is reduced by 63%. As a non-limiting example, the expression of protein and mRNA in the motor cortex is reduced by 64%. As a non-limiting example, the expression of protein and mRNA in the motor cortex is reduced by 65%. As a non-limiting example, the expression of protein and mRNA in the motor cortex is reduced by 66%. As a non-limiting example, the expression of protein and mRNA in the motor cortex is reduced by 67%. As a non-limiting example, the expression of protein and mRNA in the motor cortex is reduced by 68%. As a non-limiting example, the expression of protein and mRNA in the motor cortex is reduced by 69%. As a non-limiting example, the expression of protein and mRNA in the motor cortex is reduced by 70%.

[0052] In one embodiment, the siRNA duplexes or encoded dsRNA may be used to reduce the expression of HTT protein and/or mRNA in the somatosensory cortex. The expression of HTT protein and/or mRNA is reduced by at least about 15%, 16%, 17%, 18%, 19%, 20%, 21%, 22%, 23%, 24%, 25%, 26%, 27%, 28%, 29%, 30%, 31%, 32%, 33%, 34%, 35%, 36%, 37%, 38%, 39%, 40%, 41%, 42%, 43%, 44%, 45%, 46%, 47%, 48%, 49%, 50%, 51%, 52%, 53%, 54%, 55%, 56%, 57%, 58%, 59%, 60%, 61%, 62%, 63%, 64%, 65%, 66%, 67%, 68%, 69%, 70%, 71%, 72%, 73%, 74%, 75%, 76%, 77%, 78%, 79%, 80%, 85%, 90%, 95% and 100%, or at least 15-20%, 15-30%, 15-40%, 15-50%, 15-60%, 15-70%, 15-80%, 15-90%, 15-95%, 20-30%, 20-40%, 20-50%, 20-60%, 20-70%, 20-80%, 20-90%, 20-95%, 20-100%, 30-40%, 30-50%, 30-60%, 30-70%, 30-80%, 30-90%, 30-95%, 30-100%, 40-50%, 40-60%, 40-70%, 40-80%, 40-90%, 40-95%, 40-100%, 50-60%, 50-70%, 50-80%, 50-90%, 50-95%, 50-100%, 60-70%, 60-80%, 60-90%, 60-95%, 60-100%, 70-80%, 70-90%, 70-95%, 70-100%, 80-90%, 80-95%, 80-100%, 90-95%, 90-100% or 95-100%. As a non-limiting example, the expression of HTT protein and mRNA in the somatosensory cortex is reduced by 40-50%. As a non-limiting example, the expression of HTT protein and mRNA in the somatosensory cortex is reduced by 30-70%. As a non-limiting example, the expression of HTT protein and mRNA in the somatosensory cortex is reduced by 20-70%. As a non-limiting example, the expression of HTT protein and mRNA in the somatosensory cortex is reduced by 15-70%. As a non-limiting example, the expression of HTT protein and mRNA in the somatosensory cortex is reduced by at least 30%. As a non-limiting example, the expression of HTT protein and mRNA in the somatosensory cortex is reduced by 40-70%. As a non-limiting example, the expression of HTT protein and mRNA in the somatosensory cortex is reduced by 40-50%. As a non-limiting example, the expression of HTT protein and mRNA in the somatosensory cortex is reduced by 50-70%. As a non-limiting example, the expression of HTT protein and mRNA in the somatosensory cortex is reduced by 50-60%. As a non-limiting example, the expression of HTT protein and mRNA in the somatosensory cortex is reduced by 50%. As a non-limiting example, the expression of HTT protein and mRNA in the somatosensory cortex is reduced by 51%. As a non-limiting example, the expression of HTT protein and mRNA in the somatosensory cortex is reduced by 52%. As a non-limiting example, the expression of HTT protein and mRNA in the somatosensory cortex is reduced by 53%. As a non-limiting example, the expression of HTT protein and mRNA in the somatosensory cortex is reduced by 54%. As a non-limiting example, the expression of HTT protein and mRNA in the somatosensory cortex is reduced by 55%. As a non-limiting example, the expression of HTT protein and mRNA in the somatosensory cortex is reduced by 56%. As a non-limiting example, the expression of HTT protein and mRNA in the somatosensory cortex is reduced by 57%. As a non-limiting example, the expression of HTT protein and mRNA in the somatosensory cortex is reduced by 58%. As a non-limiting example, the expression of HTT protein and mRNA in the somatosensory cortex is reduced by 59%. As a non-limiting example, the expression of HTT protein and mRNA in the somatosensory cortex is reduced by 60%. As a non-limiting example, the expression of protein and mRNA in the somatosensory cortex is reduced by 61%. As a non-limiting example, the expression of protein and mRNA in the somatosensory cortex is reduced by 62%. As a non-limiting example, the expression of protein and mRNA in the somatosensory cortex is reduced by 63%. As a non-limiting example, the expression of protein and mRNA in the somatosensory cortex is reduced by 64%. As a non-limiting example, the expression of protein and mRNA in the somatosensory cortex is reduced by 65%. As a non-limiting example, the expression of protein and mRNA in the somatosensory cortex is reduced by 66%. As a non-limiting example, the expression of protein and mRNA in the somatosensory cortex is reduced by 67%. As a non-limiting example, the expression of protein and mRNA in the somatosensory cortex is reduced by 68%. As a non-limiting example, the expression of protein and mRNA in the somatosensory cortex is reduced by 69%. As a non-limiting example, the expression of protein and mRNA in the somatosensory cortex is reduced by 70%.

[0053] In one embodiment, the siRNA duplexes or encoded dsRNA may be used to reduce the expression of HTT protein and/or mRNA in the temporal cortex. The expression of HTT protein and/or mRNA is reduced by at least about 15%, 16%, 17%, 18%, 19%, 20%, 21%, 22%, 23%, 24%, 25%, 26%, 27%, 28%, 29%, 30%, 31%, 32%, 33%, 34%, 35%, 36%, 37%, 38%, 39%, 40%, 41%, 42%, 43%, 44%, 45%, 46%, 47%, 48%, 49%, 50%, 51%, 52%, 53%, 54%, 55%, 56%, 57%, 58%, 59%, 60%, 61%, 62%, 63%, 64%, 65%, 66%, 67%, 68%, 69%, 70%, 71%, 72%, 73%, 74%, 75%, 76%, 77%, 78%, 79%, 80%, 85%, 90%, 95% and 100%, or at least 15-20%, 15-30%, 15-40%, 15-50%, 15-60%, 15-70%, 15-80%, 15-90%, 15-95%, 20-30%, 20-40%, 20-50%, 20-60%, 20-70%, 20-80%, 20-90%, 20-95%, 20-100%, 30-40%, 30-50%, 30-60%, 30-70%, 30-80%, 30-90%, 30-95%, 30-100%, 40-50%, 40-60%, 40-70%, 40-80%, 40-90%, 40-95%, 40-100%, 50-60%, 50-70%, 50-80%, 50-90%, 50-95%, 50-100%, 60-70%, 60-80%, 60-90%, 60-95%, 60-100%, 70-80%, 70-90%, 70-95%, 70-100%, 80-90%, 80-95%, 80-100%, 90-95%, 90-100% or 95-100%. As a non-limiting example, the expression of HTT protein and mRNA in the temporal cortex is reduced by 40-50%. As a non-limiting example, the expression of HTT protein and mRNA in the temporal cortex is reduced by 30-70%. As a non-limiting example, the expression of HTT protein and mRNA in the temporal cortex is reduced by 20-70%. As a non-limiting example, the expression of HTT protein and mRNA in the temporal cortex is reduced by 15-70%. As a non-limiting example, the expression of HTT protein and mRNA in the temporal cortex is reduced by at least 30%. As a non-limiting example, the expression of HTT protein and mRNA in the temporal cortex is reduced by 40-70%. As a non-limiting example, the expression of HTT protein and mRNA in the temporal cortex is reduced by 50-70%. As a non-limiting example, the expression of HTT protein and mRNA in the temporal cortex is reduced by 50-60%. As a non-limiting example, the expression of HTT protein and mRNA in the temporal cortex is reduced by 50%. As a non-limiting example, the expression of HTT protein and mRNA in the temporal cortex is reduced by 51%. As a non-limiting example, the expression of HTT protein and mRNA in the temporal cortex is reduced by 52%. As a non-limiting example, the expression of HTT protein and mRNA in the temporal cortex is reduced by 53%. As a non-limiting example, the expression of HTT protein and mRNA in the temporal cortex is reduced by 54%. As a non-limiting example, the expression of HTT protein and mRNA in the temporal cortex is reduced by 55%. As a non-limiting example, the expression of HTT protein and mRNA in the temporal cortex is reduced by 56%. As a non-limiting example, the expression of HTT protein and mRNA in the temporal cortex is reduced by 57%. As a non-limiting example, the expression of HTT protein and mRNA in the temporal cortex is reduced by 58%. As a non-limiting example, the expression of HTT protein and mRNA in the temporal cortex is reduced by 59%. As a non-limiting example, the expression of HTT protein and mRNA in the temporal cortex is reduced by 60%. As a non-limiting example, the expression of protein and mRNA in the temporal cortex is reduced by 61%. As a non-limiting example, the expression of protein and mRNA in the temporal cortex is reduced by 62%. As a non-limiting example, the expression of protein and mRNA in the temporal cortex is reduced by 63%. As a non-limiting example, the expression of protein and mRNA in the temporal cortex is reduced by 64%. As a non-limiting example, the expression of protein and mRNA in the temporal cortex is reduced by 65%. As a non-limiting example, the expression of protein and mRNA in the temporal cortex is reduced by 66%. As a non-limiting example, the expression of protein and mRNA in the temporal cortex is reduced by 67%. As a non-limiting example, the expression of protein and mRNA in the temporal cortex is reduced by 68%. As a non-limiting example, the expression of protein and mRNA in the temporal cortex is reduced by 69%. As a non-limiting example, the expression of protein and mRNA in the temporal cortex is reduced by 70%.

[0054] In some embodiments, the present invention provides methods for treating, or ameliorating Huntington's Disease associated with HTT gene and/or HTT protein in a subject in need of treatment, the method comprising administering to the subject a pharmaceutically effective amount of at least one siRNA duplex or a nucleic acid encoding a siRNA duplex targeting the HTT gene, delivering said siRNA duplex (or encoded duplex) into targeted cells, inhibiting HTT gene expression and protein production, and ameliorating symptoms of HD in the subject.

[0055] In some embodiments, an AAV vector comprising the nucleic acid sequence of at least one siRNA duplex targeting the HTT gene is administered to the subject in need for treating and/or ameliorating HD. The AAV vector serotype may be selected from the group consisting of AAV1, AAV2, AAV3, AAV4, AAV5, AAV6, AAV7, AAV8, AAV9, AAV9.47, AAV9 (hu14), AAV10, AAV11, AAV12, AAVrh8, AAVrh10, AAV-DJ8 (AAVDJ8), AAV-DJ (AAVDJ), AAV-PHP.A (PHP.A), and/or AAV-PHP.B (PHP.B) and variants thereof. In one embodiment, the AAV vector serotype is AAV1. In one embodiment, the AAV vector serotype is AAV2. In another embodiment, the AAV vector serotype is AAV5 (e.g., as described by Miniarikova et al. MolTher (2016) 5, e297 and International Publication No. WO2016102664; the contents of each of which are herein incorporated by reference in their entireties). In another embodiment, the AAV vector is AAV-DJ. In yet another embodiment, the AAV vector serotype is AAV-DJ8.

[0056] In one embodiment, the serotype which may be useful in the present invention may be AAV-DJ8. The amino acid sequence of AAV-DJ8 may comprise two or more mutations in order to remove the heparin binding domain (HBD). As a non-limiting example, the AAV-DJ8 sequence described as SEQ ID NO: 1 in U.S. Pat. No. 7,588,772, the contents of which are herein incorporated by reference in their entirety, may comprise two mutations: (1) R587Q where arginine (R; Arg) at amino acid 587 is changed to glutamine (Q; Gln) and (2) R590T where arginine (R; Arg) at amino acid 590 is changed to threonine (T; Thr). As another non-limiting example, may comprise three mutations: (1) K406R where lysine (K; Lys) at amino acid 406 is changed to arginine (R; Arg), (2) R587Q where arginine (R; Arg) at amino acid 587 is changed to glutamine (Q; Gln) and (3) R590T where arginine (R; Arg) at amino acid 590 is changed to threonine (T; Thr).

[0057] In some embodiments, the siRNA molecules or the AAV vectors comprising such siRNA molecules may be introduced directly into the central nervous system of the subject, for example, by infusion into the putamen.

[0058] In some embodiments, the siRNA molecules or the AAV vectors comprising such siRNA molecules may be introduced directly into the central nervous system of the subject, for example, by infusion into the thalamus of a subject. While not wishing to be bound by theory, the thalamus is an area of the brain which is relatively spared in subjects with Huntington's Disease which means it may allow for more widespread cortical transduction via axonal transport of the AAV vectors.

[0059] In some embodiments, the siRNA molecules or the AAV vectors comprising such siRNA molecules may be introduced indirectly into the central nervous system of the subject, for example, by intravenous administration.

[0060] In some embodiments, the siRNA molecules or the AAV vectors comprising such siRNA molecules may be introduced directly into the central nervous system of the subject, for example, by infusion to the white matter of a subject. While not wishing to be bound by theory, distribution via direct white matter infusion may be independent of axonal transport mechanisms which may be impaired in subjects with Huntington's Disease which means white matter infusion may allow for more transport of the AAV vectors.

[0061] In some embodiments, the pharmaceutical composition of the present invention is used as a solo therapy. In other embodiments, the pharmaceutical composition of the present invention is used in combination therapy. The combination therapy may be in combination with one or more neuroprotective agents such as small molecule compounds, growth factors and hormones which have been tested for their neuroprotective effect on neuron degeneration.

[0062] In some embodiments, the present invention provides methods for treating, or ameliorating Huntington's Disease (HD) by administering to a subject in need thereof a therapeutically effective amount of a plasmid or AAV vector described herein.

[0063] The details of one or more embodiments of the invention are set forth in the accompanying description below. Although any materials and methods similar or equivalent to those described herein can be used in the practice or testing of the present invention, the preferred materials and methods are now described. Other features, objects and advantages of the invention will be apparent from the description. In the description, the singular forms also include the plural unless the context clearly dictates otherwise. Unless defined otherwise, all technical and scientific terms used herein have the same meaning as commonly understood by one of ordinary skill in the art to which this invention belongs. In the case of conflict, the present description will control.

### I. COMPOSITIONS OF THE INVENTION

### Huntington's Disease (HD)

[0064] Huntington's Disease (HD) is a monogenic fatal neurodegenerative disease characterized by progressive chorea, neuropsychiatric and cognitive dysfunction. Huntington's disease is known to be caused by an autosomal dominant triplet (CAG) repeat expansion in the huntingtin (HTT) gene, which encodes HTT protein with poly-glutamine stretch at its N-terminus. This repeat expansion results in a toxic gain of function of HTT and ultimately leads to striatal neurodegeneration which progresses to widespread brain atrophy. Medium spiny neurons of the striatum appear to be especially vulnerable in HD with up to 95% loss, whereas interneurons are largely spared.

[0065] Huntington's Disease has a profound impact on quality of life. Symptoms typically appear between the ages of 35-44 and the average life expectancy subsequent to disease onset is 10-25 years. In a small percentage of the HD population (˜6%), disease onset occurs prior to the age of 21 with appearance of an akinetic-rigid syndrome. These cases tend to progress faster than those of the later onset variety and have been classified as juvenile or Westphal variant HD. It is estimated that approximately 35,000-70,000 patients are currently suffering from HD in the US and Europe. Currently, only symptomatic relief and supportive therapies are available for treatment of HD, with a cure yet to be identified. Ultimately, individuals with HD succumb to pneumonia, heart failure or other complications such as physical injury from falls.

[0066] While not wishing to be bound by theory, the function of the wild type HTT protein may serve as a scaffold to coordinate complexes of other proteins. HTT is a very large protein (67 exons, 3144 amino acids, ˜350 kDa) that undergoes extensive post-translational modification and has numerous sites for interaction with other proteins, particularly at its N-terminus (coincidently the region that carries the repeats in HD). HTT localizes primarily to the cytoplasm but has been shown to shuttle into the nucleus where it may regulate gene transcription. It has also been suggested that HTT has a role in vesicular transport and regulating RNA trafficking.

[0067] As a non-limiting example, the HTT protein sequence is SEQ ID NO: 1 (NCBI NP_002102.4) and the HTT nucleic acid sequence is SEQ ID NO: 2 (NCBI NM_002111.7).

[0068] The mechanisms by which polyglutamine-expanded HTT protein disrupts normal HTT function and results in neurotoxicity were initially thought to be a disease of haploinsufficiency, this theory was disproven when terminal deletion of the HTT gene in man did not lead to development of HD, suggesting that fully expressed HTT protein is not critical to survival. However, conditional knockout of HTT in mouse led to neurodegeneration, indicating that some amount of HTT is necessary for cell survival. Huntingtin protein is expressed in all cells, though its concentration is highest in the brain where large aggregates of abnormal HTT are found in neuronal nuclei. In the brains of HD patients, HTT aggregates into abnormal nuclear inclusions. It is now believed that it is this process of misfolding and aggregating along with the associated protein intermediates (i.e. the soluble species and toxic N-terminal fragments) that result in neurotoxicity. In fact, HD belongs to a family of nine additional human genetic disorders all of which are characterized by CAG-expanded genes and resultant polyglutamine (poly-Q) protein products with subsequent formation of intraneuronal aggregates. Interestingly, in all of these diseases the length of the expansion correlates with both age of onset and rate of disease progression, with longer expansions linked to greater severity of disease.

[0069] Hypotheses on the molecular mechanisms underlying the neurotoxicity of polyglutamine-expanded HTT protein and its resultant aggregates have been wide ranging, but include, caspase activation, dysregulation of transcriptional pathways, increased production of reactive oxygen species, mitochondrial dysfunction, disrupted axonal transport and/or inhibition of protein degradation systems within the cell. Polyglutamine-expanded HTT may not only have a toxic gain of function, but also exert a dominant negative effect by interfering with the normal function of other cellular proteins and processes. HTT has also been implicated in non-cell autonomous neurotoxicity, whereby a cell hosting HTT spreads the HTT to other neurons nearby.

[0070] Studies in animal models of HD have suggested that phenotypic reversal is feasible, for example, subsequent to gene shut off in regulated-expression models. In a mouse model allowing shut off of expression of a 94-polyglutamine repeat HTT protein, not only was the clinical syndrome reversed but also the intracellular aggregates were resolved. Further, animal models in which silencing of HTT was tested, demonstrated promising results with the therapy being both well tolerated and showing potential therapeutic benefit.

[0071] The present invention provides modulatory polynucleotides, e.g., siRNA molecules targeting the HTT gene and methods for their design and manufacture. While not wishing to be bound by a single theory of operability, the invention provides modulatory polynucleotides, including siRNAs, that interfere with HTT expression, including HTT mutant and/or wild-type HTT gene expression. Particularly, the present invention employs viral vectors such as adeno-associated viral (AAV) vectors comprising the nucleic acid sequence encoding the siRNA molecules of the present invention. The AAV vectors comprising the nucleic acid sequence encoding the siRNA molecules of the present invention may increase the delivery of active agents into neurons of interest such as medium spiny neurons of the striatum and cortical neurons. The siRNA duplexes or encoding dsRNA targeting the HTT gene may be able to inhibit HTT gene expression (e.g., mRNA level) significantly inside cells; therefore, ameliorating HTT expression-induced stress inside the cells such as aggregation of protein and formation of inclusions, increased free radicals, mitochondrial dysfunction and RNA metabolism.

[0072] Symptoms of HD may include features attributed to CNS degeneration such as, but are not limited to, chorea, dystonia, bradykinesia, incoordination, irritability and depression, problem-solving difficulties, reduction in the ability of a person to function in their normal day to day life, diminished speech, and difficulty swallowing, as well as features not attributed to CNS degeneration such as, but not limited to, weight loss, muscle wasting, metabolic dysfunction and endocrine disturbances.

[0073] Such siRNA-mediated HTT expression inhibition may be used for treating HD. According to the present invention, methods for treating and/or ameliorating HD in a patient comprises administering to the patient an effective amount of AAV vector comprising a nucleic acid sequence encoding the siRNA molecules of the present invention into cells. The administration of the AAV vector comprising such a nucleic acid sequence will encode the siRNA molecules which cause the inhibition/silence of HTT gene expression.

[0074] In one embodiment, the vector, e.g., AAV vectors, reduces the amount of HTT in a subject in need thereof and thus provides a therapeutic benefit as described herein.

[0075] In one embodiment, a subject has fully penetrant HD where the HTT gene has 41 or more CAG repeats (e.g., 41, 42, 43, 44, 45, 46, 47, 48, 49, 50, 51, 52, 53, 54, 55, 56, 57, 58, 59, 60, 61, 62, 63, 64, 65, 66, 67, 68, 69, 70, 71, 72, 73, 74, 75, 76, 77, 78, 79, 80, 81, 82, 83, 84, 85, 86, 87, 88, 89, 90 or more than 90 CAG repeats).

[0076] In one embodiment, a subject has incomplete penetrance where the HTT gene has between 36 and 40 CAG repeats (e.g., 36, 37, 38, 39 and 40 CAG repeats).

[0077] Model systems for studying Huntington's Disease which may be used with the siRNAs and vectors described herein include, but are not limited to, cell models (e.g., primary neurons and induced pluripotent stem cells), invertebrate models (e.g., Drosophila or Caenorhabditis elegans), mouse models (e.g., YAC128 mouse model; R6/2 mouse model; BAC, YAC and knock-in mouse model), rat models (e.g., BAC) and large mammal models (e.g., pigs, sheep or monkeys).

### Modulatory Polynucleotides

[0078] In one embodiment, modulatory polynucleotides, e.g., RNA or DNA molecules, may be used to treat neurodegenerative disease, in particular, Huntington's Disease (HD). As used herein, a “modulatory polynucleotide” is any nucleic acid sequence(s) which functions to modulate (either increase or decrease) the level or amount of a target gene, e.g., mRNA or protein levels.

[0079] In one embodiment, the modulatory polynucleotides may comprise at least one nucleic acid sequence encoding at least one siRNA molecule. The nucleic acids may, independently if there is more than one, encode 1, 2, 3, 4, 5, 6, 7, 8, 9, or more than 9 siRNA molecules.

siRNA Molecules

[0080] The present invention relates to RNA interference (RNAi) induced inhibition of gene expression for treating neurodegenerative disorders. Provided herein are siRNA duplexes or encoded dsRNA that target the HTT gene (referred to herein collectively as “siRNA molecules”). Such siRNA duplexes or encoded dsRNA can reduce or silence HTT gene expression in cells, for example, medium spiny neurons, cortical neurons and/or astrocytes, thereby, ameliorating symptoms of Huntington's Disease (HD).

[0081] RNAi (also known as post-transcriptional gene silencing (PTGS), quelling, or co-suppression) is a post-transcriptional gene silencing process in which RNA molecules, in a sequence specific manner, inhibit gene expression, typically by causing the destruction of specific mRNA molecules. The active components of RNAi are short/small double stranded RNAs (dsRNAs), called small interfering RNAs (siRNAs), that typically contain 15-30 nucleotides (e.g., 19 to 25, 19 to 24 or 19-21 nucleotides) and 2 nucleotide 3′ overhangs and that match the nucleic acid sequence of the target gene. These short RNA species may be naturally produced in vivo by Dicer-mediated cleavage of larger dsRNAs and they are functional in mammalian cells.

[0082] Naturally expressed small RNA molecules, named microRNAs (miRNAs), elicit gene silencing by regulating the expression of mRNAs. The miRNAs-containing RNA Induced Silencing Complex (RISC) targets mRNAs presenting a perfect sequence complementarity with nucleotides 2-7 in the 5′region of the miRNA which is called the seed region, and other base pairs with its 3′region. miRNA-mediated down-regulation of gene expression may be caused by cleavage of the target mRNAs, translational inhibition of the target mRNAs, or mRNA decay. miRNA targeting sequences are usually located in the 3′-UTR of the target mRNAs. A single miRNA may target more than 100 transcripts from various genes, and one mRNA may be targeted by different miRNAs.

[0083] siRNA duplexes or dsRNA targeting a specific mRNA may be designed and synthesized in vitro and introduced into cells for activating RNAi processes. Elbashir et al. demonstrated that 21-nucleotide siRNA duplexes (termed small interfering RNAs) were capable of effecting potent and specific gene knockdown without inducing immune response in mammalian cells (Elbashir S M et al., Nature, 2001, 411, 494-498). Since this initial report, post-transcriptional gene silencing by siRNAs quickly emerged as a powerful tool for genetic analysis in mammalian cells and has the potential to produce novel therapeutics.

[0084] RNAi molecules which were designed to target against a nucleic acid sequence that encodes poly-glutamine repeat proteins which cause poly-glutamine expansion diseases such as Huntington's Disease, are described in U.S. Pat. Nos. 9,169,483 and 9,181,544 and International Patent Publication No. WO2015179525, the content of each of which is herein incorporated by reference in their entirety. U.S. Pat. Nos. 9,169,483 and 9,181,544 and International Patent Publication No. WO2015179525 each provide isolated RNA duplexes comprising a first strand of RNA (e.g., 15 contiguous nucleotides) and second strand of RNA (e.g., complementary to at least 12 contiguous nucleotides of the first strand) where the RNA duplex is about 15 to 30 base pairs in length. The first strand of RNA and second strand of RNA may be operably linked by an RNA loop (˜4 to 50 nucleotides) to form a hairpin structure which may be inserted into an expression cassette. Non-limiting examples of loop portions include SEQ ID NO: 9-14 of U.S. Pat. No. 9,169,483, the content of which is herein incorporated by reference in its entirety. Non-limiting examples of strands of RNA which may be used, either full sequence or part of the sequence, to form RNA duplexes include SEQ ID NO: 1-8 of U.S. Pat. No. 9,169,483 and SEQ ID NO: 1-11, 33-59, 208-210, 213-215 and 218-221 of U.S. Pat. No. 9,181,544, the contents of each of which is herein incorporated by reference in its entirety. Non-limiting examples of RNAi molecules include SEQ ID NOs: 1-8 of U.S. Pat. No. 9,169,483, SEQ ID NOs: 1-11, 33-59, 208-210, 213-215 and 218-221 of U.S. Pat. No. 9,181,544 and SEQ ID NOs: 1, 6, 7, and 35-38 of International Patent Publication No. WO2015179525, the contents of each of which is herein incorporated by reference in their entirety.

[0085] In vitro synthetized siRNA molecules may be introduced into cells in order to activate RNAi. An exogenous siRNA duplex, when it is introduced into cells, similar to the endogenous dsRNAs, can be assembled to form the RNA Induced Silencing Complex (RISC), a multiunit complex that interacts with RNA sequences that are complementary to one of the two strands of the siRNA duplex (i.e., the antisense strand). During the process, the sense strand (or passenger strand) of the siRNA is lost from the complex, while the antisense strand (or guide strand) of the siRNA is matched with its complementary RNA. In particular, the targets of siRNA containing RISC complexes are mRNAs presenting a perfect sequence complementarity. Then, siRNA mediated gene silencing occurs by cleaving, releasing and degrading the target.

[0086] The siRNA duplex comprised of a sense strand homologous to the target mRNA and an antisense strand that is complementary to the target mRNA offers much more advantage in terms of efficiency for target RNA destruction compared to the use of the single strand (ss)-siRNAs (e.g. antisense strand RNA or antisense oligonucleotides). In many cases, it requires higher concentration of the ss-siRNA to achieve the effective gene silencing potency of the corresponding duplex.

[0087] Any of the foregoing molecules may be encoded by an AAV vector or vector genome.

Design and Sequences of siRNA Duplexes Targeting HTT Gene

[0088] Some guidelines for designing siRNAs have been proposed in the art. These guidelines generally recommend generating a 19-nucleotide duplexed region, symmetric 2-3 nucleotide 3′overhangs, 5′-phosphate and 3′-hydroxyl groups targeting a region in the gene to be silenced. Other rules that may govern siRNA sequence preference include, but are not limited to, (i) A/U at the 5′ end of the antisense strand; (ii) G/C at the 5′ end of the sense strand; (iii) at least five A/U residues in the 5′ terminal one-third of the antisense strand; and (iv) the absence of any GC stretch of more than 9 nucleotides in length. In accordance with such consideration, together with the specific sequence of a target gene, highly effective siRNA molecules essential for suppressing mammalian target gene expression may be readily designed.

[0089] According to the present invention, siRNA molecules (e.g., siRNA duplexes or encoded dsRNA) that target the HTT gene are designed. Such siRNA molecules can specifically, suppress HTT gene expression and protein production. In some aspects, the siRNA molecules are designed and used to selectively “knock out” HTT gene variants in cells, i.e., mutated HTT transcripts that are identified in patients with HD disease. In some aspects, the siRNA molecules are designed and used to selectively “knock down” HTT gene variants in cells. In other aspects, the siRNA molecules are able to inhibit or suppress both the wild type and mutated HTT gene.

[0090] In one embodiment, an siRNA molecule of the present invention comprises a sense strand and a complementary antisense strand in which both strands are hybridized together to form a duplex structure. The antisense strand has sufficient complementarity to the HTT mRNA sequence to direct target-specific RNAi, i.e., the siRNA molecule has a sequence sufficient to trigger the destruction of the target mRNA by the RNAi machinery or process.

[0091] In one embodiment, an siRNA molecule of the present invention comprises a sense strand and a complementary antisense strand in which both strands are hybridized together to form a duplex structure and where the start site of the hybridization to the HTT mRNA is between nucleotide 100 and 7000 on the HTT mRNA sequence. As a non-limiting example, the start site may be between nucleotide 100-150, 150-200, 200-250, 250-300, 300-350, 350-400, 400-450, 450-500, 500-550, 550-600, 600-650, 650-700, 700-70, 750-800, 800-850, 850-900, 900-950, 950-1000, 1000-1050, 1050-1100, 1100-1150, 1150-1200, 1200-1250, 1250-1300, 1300-1350, 1350-1400, 1400-1450, 1450-1500, 1500-1550, 1550-1600, 1600-1650, 1650-1700, 1700-1750, 1750-1800, 1800-1850, 1850-1900, 1900-1950, 1950-2000, 2000-2050, 2050-2100, 2100-2150, 2150-2200, 2200-2250, 2250-2300, 2300-2350, 2350-2400, 2400-2450, 2450-2500, 2500-2550, 2550-2600, 2600-2650, 2650-2700, 2700-2750, 2750-2800, 2800-2850, 2850-2900, 2900-2950, 2950-3000, 3000-3050, 3050-3100, 3100-3150, 3150-3200, 3200-3250, 3250-3300, 3300-3350, 3350-3400, 3400-3450, 3450-3500, 3500-3550, 3550-3600, 3600-3650, 3650-3700, 3700-3750, 3750-3800, 3800-3850, 3850-3900, 3900-3950, 3950-4000, 4000-4050, 4050-4100, 4100-4150, 4150-4200, 4200-4250, 4250-4300, 4300-4350, 4350-4400, 4400-4450, 4450-4500, 4500-4550, 4550-4600, 4600-4650, 4650-4700, 4700-4750, 4750-4800, 4800-4850, 4850-4900, 4900-4950, 4950-5000, 5000-5050, 5050-5100, 5100-5150, 5150-5200, 5200-5250, 5250-5300, 5300-5350, 5350-5400, 5400-5450, 5450-5500, 5500-5550, 5550-5600, 5600-5650, 5650-5700, 5700-5750, 5750-5800, 5800-5850, 5850-5900, 5900-5950, 5950-6000, 6000-6050, 6050-6100, 6100-6150, 6150-6200, 6200-6250, 6250-6300, 6300-6350, 6350-6400, 6400-6450, 6450-6500, 6500-6550, 6550-6600, 6600-6650, 6650-6700, 6700-6750, 6750-6800, 6800-6850, 6850-6900, 6900-6950, 6950-7000, 7000-7050, 7050-7100, 7100-7150, 7150-7200, 7200-7250, 7250-7300, 7300-7350, 7350-7400, 7400-7450, 7450-7500, 7500-7550, 7550-7600, 7600-7650, 7650-7700, 7700-7750, 7750-7800, 7800-7850, 7850-7900, 7900-7950, 7950-8000, 8000-8050, 8050-8100, 8100-8150, 8150-8200, 8200-8250, 8250-8300, 8300-8350, 8350-8400, 8400-8450, 8450-8500, 8500-8550, 8550-8600, 8600-8650, 8650-8700, 8700-8750, 8750-8800, 8800-8850, 8850-8900, 8900-8950, 8950-9000, 9000-9050, 9050-9100, 9100-9150, 9150-9200, 9200-9250, 9250-9300, 9300-9350, 9350-9400, 9400-9450, 9450-9500, 9500-9550, 9550-9600, 9600-9650, 9650-9700, 9700-9750, 9750-9800, 9800-9850, 9850-9900, 9900-9950, 9950-10000, 10000-10050, 10050-10100, 10100-10150, 10150-10200, 10200-10250, 10250-10300, 10300-10350, 10350-10400, 10400-10450, 10450-10500, 10500-10550, 10550-10600, 10600-10650, 10650-10700, 10700-10750, 10750-10800, 10800-10850, 10850-10900, 10900-10950, 10950-11000, 11050-11100, 11100-11150, 11150-11200, 11200-11250, 11250-11300, 11300-11350, 11350-11400, 11400-11450, 11450-11500, 11500-11550, 11550-11600, 11600-11650, 11650-11700, 11700-11750, 11750-11800, 11800-11850, 11850-11900, 11900-11950, 11950-12000, 12000-12050, 12050-12100, 12100-12150, 12150-12200, 12200-12250, 12250-12300, 12300-12350, 12350-12400, 12400-12450, 12450-12500, 12500-12550, 12550-12600, 12600-12650, 12650-12700, 12700-12750, 12750-12800, 12800-12850, 12850-12900, 12900-12950, 12950-13000, 13050-13100, 13100-13150, 13150-13200, 13200-13250, 13250-13300, 13300-13350, 13350-13400, 13400-13450, and 13450-13500 on the HTT mRNA sequence. As yet another non-limiting example, the start site may be nucleotide 315, 316, 317, 318, 319, 320, 321, 322, 323, 324, 325, 326, 327, 328, 329, 330, 331, 332, 333, 334, 335, 336, 337, 338, 339, 340, 341, 342, 343, 344, 345, 346, 347, 348, 349, 350, 595, 596, 597, 598, 599, 600, 601, 602, 603, 604, 605, 606, 607, 608, 609, 610, 611, 612, 613, 614, 615, 616, 617, 618, 619, 620, 621, 622, 623, 624, 625, 715, 716, 717, 718, 719, 720, 721, 722, 723, 724, 725, 875, 876, 877, 878, 879, 880, 881, 882, 883, 884, 885, 886, 887, 888, 889, 890, 891, 892, 893, 894, 895, 896, 897, 898, 899, 900, 1375, 1376, 1377, 1378, 1379, 1380, 1381, 1382, 1383, 1384, 1385, 1386, 1387, 1388, 1389, 1390, 1391, 1392, 1393, 1394, 1395, 1396, 1397, 1398, 1399, 1400, 1401, 1402, 1403, 1404, 1405, 1406, 1407, 1408, 1409, 1410, 1411, 1412, 1413, 1414, 1415, 1416, 1417, 1418, 1419, 1420, 1421, 1422, 1423, 1424, 1425, 1426, 1427, 1428, 1429, 1430, 1431, 1432, 1433, 1434, 1435, 1436, 1437, 1438, 1439, 1440, 1441, 1442, 1443, 1444, 1445, 1446, 1447, 1448, 1449, 1450, 1660, 1661, 1662, 1663, 1664, 1665, 1666, 1667, 1668, 1669, 1670, 1671, 1672, 1673, 1674, 1675, 2050, 2051, 2052, 2053, 2054, 2055, 2056, 2057, 2058, 2059, 2060, 2061, 2062, 2063, 2064, 2065, 2066, 2067, 2068, 2069, 2070, 2071, 2072, 2073, 2074, 2075, 2076, 2077, 2078, 2079, 2080, 2081, 2082, 2083, 2084, 2085, 2086, 2087, 2088, 2089, 2090, 2091, 2092, 2093, 2094, 2095, 2096, 2097, 2098, 2099, 2100, 2580, 2581, 2582, 2583, 2584, 2585, 2586, 2587, 2588, 2589, 2590, 2591, 2592, 2593, 2594, 2595, 2596, 2597, 2598, 2599, 2600, 2601, 2602, 2603, 2604, 2605, 4525, 4526, 4527, 4528, 4529, 4530, 4531, 4532, 4533, 4534, 4535, 4536, 4537, 4538, 4539, 4540, 4541, 4542, 4543, 4544, 4545, 4546, 4547, 4548, 4549, 4550, 4575, 4576, 4577, 4578, 4579, 4580, 4581, 4582, 4583, 4584, 4585, 4586, 4587, 4588, 4589, 4590, 4591, 4592, 4593, 4594, 4595, 4596, 4597, 4598, 4599, 4600, 4850, 4851, 4852, 4853, 4854, 4855, 4856, 4857, 4858, 4859, 4860, 4861, 4862, 4863, 4864, 4865, 4866, 4867, 4868, 4869, 4870, 4871, 4872, 4873, 4874, 4875, 4876, 4877, 4878, 4879, 4880, 4881, 4882, 4883, 4884, 4885, 4886, 4887, 4888, 4889, 4890, 4891, 4892, 4893, 4894, 4895, 4896, 4897, 4898, 4899, 4900, 5460, 5461, 5462, 5463, 5464, 5465, 5466, 5467, 5468, 5469, 5470, 5471, 5472, 5473, 5474, 5475, 5476, 5477, 5478, 5479, 5480, 6175, 6176, 6177, 6178, 6179, 6180, 6181, 6182, 6183, 6184, 6185, 6186, 6187, 6188, 6189, 6190, 6191, 6192, 6193, 6194, 6195, 6196, 6197, 6198, 6199, 6200, 6315, 6316, 6317, 6318, 6319, 6320, 6321, 6322, 6323, 6324, 6325, 6326, 6327, 6328, 6329, 6330, 6331, 6332, 6333, 6334, 6335, 6336, 6337, 6338, 6339, 6340, 6341, 6342, 6343, 6344, 6345, 6600, 6601, 6602, 6603, 6604, 6605, 6606, 6607, 6608, 6609, 6610, 6611, 6612, 6613, 6614, 6615, 6725, 6726, 6727, 6728, 6729, 6730, 6731, 6732, 6733, 6734, 6735, 6736, 6737, 6738, 6739, 6740, 6741, 6742, 6743, 6744, 6745, 6746, 6747, 6748, 6749, 6750, 6751, 6752, 6753, 6754, 6755, 6756, 6757, 6758, 6759, 6760, 6761, 6762, 6763, 6764, 6765, 6766, 6767, 6768, 6769, 6770, 6771, 6772, 6773, 6774, 6775, 7655, 7656, 7657, 7658, 7659, 7660, 7661, 7662, 7663, 7664, 7665, 7666, 7667, 7668, 7669, 7670, 7671, 7672, 8510, 8511, 8512, 8513, 8514, 8515, 8516, 8715, 8716, 8717, 8718, 8719, 8720, 8721, 8722, 8723, 8724, 8725, 8726, 8727, 8728, 8729, 8730, 8731, 8732, 8733, 8734, 8735, 8736, 8737, 8738, 8739, 8740, 8741, 8742, 8743, 8744, 8745, 9250, 9251, 9252, 9253, 9254, 9255, 9256, 9257, 9258, 9259, 9260, 9261, 9262, 9263, 9264, 9265, 9266, 9267, 9268, 9269, 9270, 9480, 9481, 9482, 9483, 9484, 9485, 9486, 9487, 9488, 9489, 9490, 9491, 9492, 9493, 9494, 9495, 9496, 9497, 9498, 9499, 9500, 9575, 9576, 9577, 9578, 9579, 9580, 9581, 9582, 9583, 9584, 9585, 9586, 9587, 9588, 9589, 9590, 10525, 10526, 10527, 10528, 10529, 10530, 10531, 10532, 10533, 10534, 10535, 10536, 10537, 10538, 10539, 10540, 11545, 11546, 11547, 11548, 11549, 11550, 11551, 11552, 11553, 11554, 11555, 11556, 11557, 11558, 11559, 11560, 11875, 11876, 11877, 11878, 11879, 11880, 11881, 11882, 11883, 11884, 11885, 11886, 11887, 11888, 11889, 11890, 11891, 11892, 11893, 11894, 11895, 11896, 11897, 11898, 11899, 11900, 11915, 11916, 11917, 11918, 11919, 11920, 11921, 11922, 11923, 11924, 11925, 11926, 11927, 11928, 11929, 11930, 11931, 11932, 11933, 11934, 11935, 11936, 11937, 11938, 11939, 11940, 13375, 13376, 13377, 13378, 13379, 13380, 13381, 13382, 13383, 13384, 13385, 13386, 13387, 13388, 13389 and 13390 on the HTT mRNA sequence.

[0092] In some embodiments, the antisense strand and target mRNA sequences have 100% complementary. The antisense strand may be complementary to any part of the target mRNA sequence.

[0093] In other embodiments, the antisense strand and target mRNA sequences comprise at least one mismatch. As a non-limiting example, the antisense strand and the target mRNA sequence have at least 30%, 40%, 50%, 60%, 70%, 80%, 81%, 82%, 83%, 84%, 85%, 86%, 87%, 88%, 89%, 90%, 91%, 92%, 93%, 94%, 95%, 96%, 97%, 98% or 99% or at least 20-30%, 20-40%, 20-50%, 20-60%, 20-70%, 20-80%, 20-90%, 20-95%, 20-99%, 30-40%, 30-50%, 30-60%, 30-70%, 30-80%, 30-90%, 30-95%, 30-99%, 40-50%, 40-60%, 40-70%, 40-80%, 40-90%, 40-95%, 40-99%, 50-60%, 50-70%, 50-80%, 50-90%, 50-95%, 50-99%, 60-70%, 60-80%, 60-90%, 60-95%, 60-99%, 70-80%, 70-90%, 70-95%, 70-99%, 80-90%, 80-95%, 80-99%, 90-95%, 90-99% or 95-99% complementarity.

[0094] According to the present invention, the siRNA molecule has a length from about 10-50 or more nucleotides, i.e., each strand comprising 10-50 nucleotides (or nucleotide analogs). Preferably, the siRNA molecule has a length from about 15-30, e.g., 15, 16, 17, 18, 19, 20, 21, 22, 23, 24, 25, 26, 27, 28, 29, or 30 nucleotides in each strand, wherein one of the strands is sufficiently complementarity to a target region. In one embodiment, the siRNA molecule has a length from about 19 to 25, 19 to 24 or 19 to 21 nucleotides.

[0095] In some embodiments, the siRNA molecules of the present invention can be synthetic RNA duplexes comprising about 19 nucleotides to about 25 nucleotides, and two overhanging nucleotides at the 3′-end. In some aspects, the siRNA molecules may be unmodified RNA molecules. In other aspects, the siRNA molecules may contain at least one modified nucleotide, such as base, sugar or backbone modifications.

[0096] In one embodiment, the siRNA molecules of the present invention may comprise a nucleotide sequence such as, but not limited to, the antisense (guide) sequences in Table 1 or a fragment or variant thereof. As a non-limiting example, the antisense sequence used in the siRNA molecule of the present invention is at least 30%, 40%, 50%, 60%, 70%, 80%, 81%, 82%, 83%, 84%, 85%, 86%, 87%, 88%, 89%, 90%, 91%, 92%, 93%, 94%, 95%, 96%, 97%, 98% or 99% or at least 20-30%, 20-40%, 20-50%, 20-60%, 20-70%, 20-80%, 20-90%, 20-95%, 20-99%, 30-40%, 30-50%, 30-60%, 30-70%, 30-80%, 30-90%, 30-95%, 30-99%, 40-50%, 40-60%, 40-70%, 40-80%, 40-90%, 40-95%, 40-99%, 50-60%, 50-70%, 50-80%, 50-90%, 50-95%, 50-99%, 60-70%, 60-80%, 60-90%, 60-95%, 60-99%, 70-80%, 70-90%, 70-95%, 70-99%, 80-90%, 80-95%, 80-99%, 90-95%, 90-99% or 95-99% of a nucleotide sequence in Table 1. As another non-limiting example, the antisense sequence used in the siRNA molecule of the present invention comprises at least 3, 4, 5, 6, 7, 8, 9, 10, 11, 12, 13, 14, 15, 16, 17, 18, 19, 20, 21 or more than 21 consecutive nucleotides of a nucleotide sequence in Table 1. As yet another non-limiting example, the antisense sequence used in the siRNA molecule of the present invention comprises nucleotides 1 to 22, 1 to 21, 1 to 20, 1 to 19, 1 to 18, 1 to 17, 1 to 16, 1 to 15, 1 to 14, 1 to 13, 1 to 12, 1 to 11, 1 to 10, 1 to 9, 1 to 8, 2 to 22, 2 to 21, 2 to 20, 2 to 19, 2 to 18, 2 to 17, 2 to 16, 2 to 15, 2 to 14, 2 to 13, 2 to 12, 2 to 11, 2 to 10, 2 to 9, 2 to 8, 3 to 22, 3 to 21, 3 to 20, 3 to 19, 3 to 18, 3 to 17, 3 to 16, 3 to 15, 3 to 14, 3 to 13, 3 to 12, 3 to 11, 3 to 10, 3 to 9, 3 to 8, 4 to 22, 4 to 21, 4 to 20, 4 to 19, 4 to 18, 4 to 17, 4 to 16, 4 to 15, 4 to 14, 4 to 13, 4 to 12, 4 to 11, 4 to 10, 4 to 9, 4 to 8, 5 to 22, 5 to 21, 5 to 20, 5 to 19, 5 to 18, 5 to 17, 5 to 16, 5 to 15, 5 to 14, 5 to 13, 5 to 12, 5 to 11, 5 to 10, 5 to 9, 5 to 8, 6 to 22, 6 to 21, 6 to 20, 6 to 19, 6 to 18, 6 to 17, 6 to 16, 6 to 15, 6 to 14, 6 to 13, 6 to 12, 6 to 11, 6 to 10, 7 to 22, 7 to 21, 7 to 20, 7 to 19, 7 to 18, 7 to 17, 7 to 16, 7 to 15, 7 to 14, 7 to 13, 7 to 12, 8 to 22, 8 to 21, 8 to 20, 8 to 19, 8 to 18, 8 to 17, 8 to 16, 8 to 15, 8 to 14, 8 to 13, 8 to 12, 9 to 22, 9 to 21, 9 to 20, 9 to 19, 9 to 18, 9 to 17, 9 to 16, 9 to 15, 9 to 14, 10 to 22, 10 to 21, 10 to 20, 10 to 19, 10 to 18, 10 to 17, 10 to 16, 10 to 15, 10 to 14, 11 to 22, 11 to 21, 11 to 20, 11 to 19, 11 to 18, 11 to 17, 11 to 16, 11 to 15, 11 to 14, 12 to 22, 12 to 21, 12 to 20, 12 to 19, 12 to 18, 12 to 17, 12 to 16, 13 to 22, 13 to 21, 13 to 20, 13 to 19, 13 to 18, 13 to 17, 13 to 16, 14 to 22, 14 to 21, 14 to 20, 14 to 19, 14 to 18, 14 to 17, 15 to 22, 15 to 21, 15 to 20, 15 to 19, 15 to 18, 16 to 22, 16 to 21, 16 to 20, 17 to 22, 17 to 21, or 18 to 22 of the sequences in Table 1.

TABLE 1
Antisense Sequences

| Antisense | | SEQ ID |
|---|---|---|
| ID | Sequence | NO |
| A-2000 | UUAACGUCAGUUCAUAAACUU | 3 |
| A-2000dt | UUAACGUCAGUUCAUAAACdTdT | 4 |
| A-2001 | UGUCGGUACCGUCUAACACUU | 5 |
| A-2001dt | UGUCGGUACCGUCUAACACdTdT | 6 |
| A-2002 | UAAGCAUGGAGCUAGCAGGUU | 7 |
| A-2002dt | UAAGCAUGGAGCUAGCAGGdTdT | 8 |
| A-2003 | UACAACGAGACUGAAUUGCUU | 9 |
| A-2003dt | UACAACGAGACUGAAUUGCdTdT | 10 |
| A-2004 | UUCAGUUCAUAAACCUGGAUU | 11 |
| A-2004dt | UUCAGUUCAUAAACCUGGAdTdT | 12 |
| A-2005 | UAACGUCAGUUCAUAAACCUU | 13 |
| A-2005dt | UAACGUCAGUUCAUAAACCdTdT | 14 |
| A-2006 | UCCGGUCACAACAUUGUGGUU | 15 |
| A-2006dt | UCCGGUCACAACAUUGUGGdTdT | 16 |
| A-2007 | UUGCACGGUUCUUUGUGACUU | 17 |
| A-2007dt | UUGCACGGUUCUUUGUGACdTdT | 18 |
| A-2008 | UUUUAUAACAAGAGGUUCAUU | 19 |
| A-2008dt | UUUUAUAACAAGAGGUUCAdTdT | 20 |
| A-2009 | UCCAAAUACUGGUUGUCGGUU | 21 |
| A-2009dt | UCCAAAUACUGGUUGUCGGdTdT | 22 |
| A-2010 | UAUUUUAGGAAUUCCAAUGUU | 23 |
| A-2010dt | UAUUUUAGGAAUUCCAAUGdTdT | 24 |
| A-2011 | UUUAGGAAUUCCAAUGAUCUU | 25 |
| A-2011dt | UUUAGGAAUUCCAAUGAUCdTdT | 26 |
| A-2012dt | UUAAUCUCUUUACUGAUAUdTdT | 27 |
| A-2013dt | GAUUUUAGGAAUUCCAAUGdTdT | 28 |
| A-2014 | UAAGCAUGGAGCUAGCAGGCUU | 29 |
| A-2015 | UAAGCAUGGAGCUAGCAGGGU | 30 |
| A-2016 | AAGGACUUGAGGGACUCGAAGU | 31 |
| A-2017 | AAGGACUUGAGGGACUCGAAG | 32 |
| A-2018 | AAGGACUUGAGGGACUCGA | 33 |
| A-2019 | AGGACUUGAGGGACUCGAAGU | 34 |
| A-2020 | GAGGACUUGAGGGACUCGAAGU | 35 |
| A-2021 | AAGGACUUGAGGGACUCGAAGU | 36 |
| A-2022 | AAGGACUUGAGGGACUCGAAGUU | 37 |
| A-2023 | AAGGACUUGAGGGACUCGAAG | 38 |
| A-2024 | AAGGACUUGAGGGACUCGA | 39 |
| A-2025 | AAGGACUUGAGGGACUCGAAGG | 40 |
| A-2026 | AAGGACUUGAGGGACUCGAAU | 41 |
| A-2027 | AAGGACUUGAGGGACUCGAAGA | 42 |
| A-2028 | AAGGACUUGAGGGACUCGAAGG | 43 |
| A-2029 | AAGGACUUGAGGGACUCGAAGGU | 44 |
| A-2030 | AAGGACUUGAGGGACUCGAAGGA | 45 |
| A-2031 | AAGGACUUGAGGGACUCGAAG | 46 |
| A-2032 | AAGGACUUGAGGGACUCGAAGU | 47 |
| A-2033 | AAGGACUUGAGGGACUCGA | 48 |
| A-2034 | AAGGACUUGAGGGACUCGAAGGA | 49 |
| A-2035 | AAGGACUUGAGGGACUCGAAGG | 50 |
| A-2036 | AAGGACUUGAGGGACUCGAAGGAU | 51 |
| A-2037 | AAGGACUUGAGGGACUCGAAGGAUU | 52 |
| A-2038 | AAGGACUUGAGGGACUCGAAG | 53 |
| A-2039 | AAGGACUUGAGGGACUCGAAGGAA | 54 |
| A-2040 | GAUGAAGUGCACACAUUGGAUGA | 55 |
| A-2041 | GAUGAACUGCACACAUUGGAUG | 56 |
| A-2042 | GAUGAAUUGCACACAGUAGAUGA | 57 |
| A-2043 | AAGGACUUGAGGGACUCGAAGGUU | 58 |
| A-2044 | AAGGACUUGAGGGACUCGAAGGUUU | 59 |
| A-2045 | AAGGACUUGAGGGACUCGAAGGU | 60 |
| A-2046 | AAGGACUUGAGGGACUCGAAGGUUUU | 61 |
| A-2047 | AAGGACUUGAGGGACUCGAAGGUUUUU | 62 |
| A-2048 | AAGGACUUGAGGGACUCGAAGG | 63 |
| A-2049 | UAAGGACUUGAGGGACUCGAAG | 64 |
| A-2050 | AAGGACUUGAGGGACUCGAAG | 65 |
| A-2051 | AAGGACUUGAGGGACUCGAAGU | 66 |
| A-2052 | AAGGACUUGAGGGACUCGAAGACGAGUCCC | 67 |
| A-2053 | AAGGACUUGAGGGACUCGAAGACGAGUCCCA | 68 |
| A-2054 | AAGGACUUGAGGGACUCGAAGACGAGUCCCU | 69 |
| A-2055 | GAUGAAGUGCACACAUUGGAUAC | 70 |
| A-2056 | GAUGAAGUGCACACAUUGGAUACA | 71 |
| A-2057 | GAUGAAGUGCACACAUUGGAUACAAUGUGU | 72 |
| A-2058 | GAUGAAGUGCACACAUUGGAU | 73 |
| A-2059 | GAUGAAGUGCACACAUUGGAUA | 74 |
| A-2060 | GAUGAAUUGCACACAGUAGAUAU | 75 |
| A-2061 | GAUGAAUUGCACACAGUAGAUAUAC | 76 |
| A-2062 | GAUGAAUUGCACACAGUAGAUAUACUGUGU | 77 |
| A-2063 | GAUGAAUUGCACACAGUAGAUAUA | 78 |
| A-2064 | AUGAAUUGCACACAGUAGAUAUAC | 79 |
| A-2065 | GAUGAAUUGCACACAGUAGAUA | 80 |
| A-2066 | GAUGAAUUGCACACAGUAGAUAUACUGUGU | 81 |
| A-2067 | UACAACGAGACUGAAUUGCU | 82 |
| A-2068 | ACAACGAGACUGAAUUGCUU | 83 |
| A-2069 | UCCGGUCACAACAUUGUGGUUC | 84 |
| A-2070 | UCCGGUCACAACAUUGUGGU | 85 |
| A-2071 | UCCGGUCACAACAUUGUG | 86 |
| A-2072 | CCGGUCACAACAUUGUGGUU | 87 |
| A-2073 | UUUUAUAACAAGAGGUUCAU | 88 |
| A-2074 | UUUAUAACAAGAGGUUCAUU | 89 |
| A-2075 | UAAGCAUGGAGCUAGCAGGU | 90 |
| A-2076 | AAGCAUGGAGCUAGCAGGUU | 91 |
| A-2077 | CCAAAUACUGGUUGUCGGUU | 92 |
| A-2078 | UACAACGAGACUGAAUUGCUUU | 93 |
| A-2079 | UAACGUCAGUUCAUAAACCUUU | 94 |
| A-2080 | GUCCGGUCACAACAUUGUGGUU | 95 |
| A-2081 | UCCGGUCACAACAUUGUGGUUUG | 96 |
| A-2082 | UCCGGUCACAACAUUGUGGUUU | 97 |
| A-2083 | UCCGGUCACAACAUUGUGG | 98 |
| A-2084 | UAAGCAUGGAGCUAGCAGGUUU | 99 |
| A-2085 | AAGCAUGGAGCUAGCAGGUUU | 100 |
| A-2086 | UCCAAAUACUGGUUGUCGGUUU | 101 |
| A-2087 | CCAAAUACUGGUUGUCGGUUU | 102 |

[0097] In one embodiment, the siRNA molecules of the present invention may comprise a nucleotide sequence such as, but not limited to, the sense (passenger) sequences in Table 2 or a fragment or variant thereof. As a non-limiting example, the sense sequence used in the siRNA molecule of the present invention is at least 30%, 40%, 50%, 60%, 70%, 80%, 81%, 82%, 83%, 84%, 85%, 86%, 87%, 88%, 89%, 90%, 91%, 92%, 93%, 94%, 95%, 96%, 97%, 98% or 99% or at least 20-30%, 20-40%, 20-50%, 20-60%, 20-70%, 20-80%, 20-90%, 20-95%, 20-99%, 30-40%, 30-50%, 30-60%, 30-70%, 30-80%, 30-90%, 30-95%, 30-99%, 40-50%, 40-60%, 40-70%, 40-80%, 40-90%, 40-95%, 40-99%, 50-60%, 50-70%, 50-80%, 50-90%, 50-95%, 50-99%, 60-70%, 60-80%, 60-90%, 60-95%, 60-99%, 70-80%, 70-90%, 70-95%, 70-99%, 80-90%, 80-95%, 80-99%, 90-95%, 90-99% or 95-99% of a nucleotide sequence in Table 2. As another non-limiting example, the sense sequence used in the siRNA molecule of the present invention comprises at least 3, 4, 5, 6, 7, 8, 9, 10, 11, 12, 13, 14, 15, 16, 17, 18, 19, 20, 21 or more than 21 consecutive nucleotides of a nucleotide sequence in Table 2. As yet another non-limiting example, the sense sequence used in the siRNA molecule of the present invention comprises nucleotides 1 to 22, 1 to 21, 1 to 20, 1 to 19, 1 to 18, 1 to 17, 1 to 16, 1 to 15, 1 to 14, 1 to 13, 1 to 12, 1 to 11, 1 to 10, 1 to 9, 1 to 8, 2 to 22, 2 to 21, 2 to 20, 2 to 19, 2 to 18, 2 to 17, 2 to 16, 2 to 15, 2 to 14, 2 to 13, 2 to 12, 2 to 11, 2 to 10, 2 to 9, 2 to 8, 3 to 22, 3 to 21, 3 to 20, 3 to 19, 3 to 18, 3 to 17, 3 to 16, 3 to 15, 3 to 14, 3 to 13, 3 to 12, 3 to 11, 3 to 10, 3 to 9, 3 to 8, 4 to 22, 4 to 21, 4 to 20, 4 to 19, 4 to 18, 4 to 17, 4 to 16, 4 to 15, 4 to 14, 4 to 13, 4 to 12, 4 to 11, 4 to 10, 4 to 9, 4 to 8, 5 to 22, 5 to 21, 5 to 20, 5 to 19, 5 to 18, 5 to 17, 5 to 16, 5 to 15, 5 to 14, 5 to 13, 5 to 12, 5 to 11, 5 to 10, 5 to 9, 5 to 8, 6 to 22, 6 to 21, 6 to 20, 6 to 19, 6 to 18, 6 to 17, 6 to 16, 6 to 15, 6 to 14, 6 to 13, 6 to 12, 6 to 11, 6 to 10, 7 to 22, 7 to 21, 7 to 20, 7 to 19, 7 to 18, 7 to 17, 7 to 16, 7 to 15, 7 to 14, 7 to 13, 7 to 12, 8 to 22, 8 to 21, 8 to 20, 8 to 19, 8 to 18, 8 to 17, 8 to 16, 8 to 15, 8 to 14, 8 to 13, 8 to 12, 9 to 22, 9 to 21, 9 to 20, 9 to 19, 9 to 18, 9 to 17, 9 to 16, 9 to 15, 9 to 14, 10 to 22, 10 to 21, 10 to 20, 10 to 19, 10 to 18, 10 to 17, 10 to 16, 10 to 15, 10 to 14, 11 to 22, 11 to 21, 11 to 20, 11 to 19, 11 to 18, 11 to 17, 11 to 16, 11 to 15, 11 to 14, 12 to 22, 12 to 21, 12 to 20, 12 to 19, 12 to 18, 12 to 17, 12 to 16, 13 to 22, 13 to 21, 13 to 20, 13 to 19, 13 to 18, 13 to 17, 13 to 16, 14 to 22, 14 to 21, 14 to 20, 14 to 19, 14 to 18, 14 to 17, 15 to 22, 15 to 21, 15 to 20, 15 to 19, 15 to 18, 16 to 22, 16 to 21, 16 to 20, 17 to 22, 17 to 21, or 18 to 22 of the sequences in Table 2.

TABLE 2
Sense Sequences

| | | SEQ |
|---|---|---|
| | | ID |
| Sense ID | Sequence | NO |
| S-1000 | GUUUAUGAACUGAUCUUACCC | 103 |
| S-1001 | GUGUUAGACGGUACUGAUCCC | 104 |
| S-1002 | CCUGCUAGCUCCAUGCUUCCC | 105 |
| S-1003 | GUUUAUGAACUGAUCUUAGCC | 106 |
| S-1004 | GUGUUAGACGGUACUGAUGCC | 107 |
| S-1005 | CCUGCUAGCUCCAUGCUUGCC | 108 |
| S-1006 | GUUUAUGAAGUGAUCUUAACC | 109 |
| S-1007 | GUGUUAGACCGUACUGAUACC | 110 |
| S-1008 | CCUGCUAGCACCAUGCUUACC | 111 |
| S-1009 | GUUUAUGAACUGAUCUUAACC | 112 |
| S-1010 | GUGUUAGACGGUACUGAUACC | 113 |
| S-1011 | CCUGCUAGCUCCAUGCUUACC | 114 |
| S-1011dt | CCUGCUAGCUCCAUGCUUAdTdT | 115 |
| S-1012 | GUUUAUGAACUGAUCUUGCCC | 116 |
| S-1013 | GUUUAUGAACUGAUCUUGGCC | 117 |
| S-1014 | GUUUAUGAACUGAUCUUGACC | 118 |
| S-1015 | GCAAUUCAGUCUCGUUGUCCC | 119 |
| S-1016 | UCCAGGUUUAUGAACUGACCC | 120 |
| S-1017 | GGUUUAUGAACUGACGUUCCC | 121 |
| S-1018 | CCACAAUGUUGUGACUGGCCC | 122 |
| S-1019 | GUCACAAAGAACCGUGUACCC | 123 |
| S-1020 | UGAACCUCUUGUUAUAAACCC | 124 |
| S-1021 | CCGACAACCAGUAUUUGGCCC | 125 |
| S-1022 | GCAAUUCAGUCUCGUUGUGCC | 126 |
| S-1023 | UCCAGGUUUAUGAACUGAGCC | 127 |
| S-1024 | GGUUUAUGAACUGACGUUGCC | 128 |
| S-1025 | CCACAAUGUUGUGACUGGGCC | 129 |
| S-1026 | GUCACAAAGAACCGUGUAGCC | 130 |
| S-1027 | UGAACCUCUUGUUAUAAAGCC | 131 |
| S-1028 | CCGACAACCAGUAUUUGGGCC | 132 |
| S-1029 | GCAAUUCAGUCUCGUUGUACC | 133 |
| S-1029dt | GCAAUUCAGUCUCGUUGUAdTdT | 134 |
| S-1030 | UCCAGGUUUAUGAACUGAACC | 135 |
| 5-1030dt | UCCAGGUUUAUGAACUGAAdTdT | 136 |
| S-1031 | GGUUUAUGAACUGACGUUACC | 137 |
| S-1032 | CCACAAUGUUGUGACUGGACC | 138 |
| S-1033 | GUCACAAAGAACCGUGUAACC | 139 |
| S-1034 | UGAACCUCUUGUUAUAAAACC | 140 |
| S-1034dt | UGAACCUCUUGUUAUAAAAdTdT | 141 |
| S-1035 | CCGACAACCAGUAUUUGGACC | 142 |
| S-1035dt | CCGACAACCAGUAUUUGGAdTdT | 143 |
| S-1036 | GCAAUUCAGACUCGUUGUACC | 144 |
| S-1037 | UCCAGGUUUUUGAACUGAACC | 145 |
| S-1038 | GGUUUAUGAUCUGACGUUACC | 146 |
| S-1039 | CCACAAUGUAGUGACUGGACC | 147 |
| S-1040 | GUCACAAAGUACCGUGUAACC | 148 |
| S-1041 | UGAACCUCUAGUUAUAAAACC | 149 |
| S-1042 | CCGACAACCUGUAUUUGGACC | 150 |
| S-1043 | CAUUGGAAUUCCUAAAAUUCC | 151 |
| S-1044 | GAUCAUUGGAAUUCCUAAUCC | 152 |
| S-1045 | CAUUGGAAUUCCUAAAAUGCC | 153 |
| S-1046 | GAUCAUUGGAAUUCCUAAGCC | 154 |
| S-1047 | CAUUGGAAUUCCUAAAAUACC | 155 |
| S-1047dt | CAUUGGAAUUCCUAAAAUAdTdT | 156 |
| S-1048 | GAUCAUUGGAAUUCCUAAACC | 157 |
| S-1048dt | GAUCAUUGGAAUUCCUAAAdTdT | 158 |
| S-1049 | CAUUGGAAUACCUAAAAUACC | 159 |
| S-1050 | GAUCAUUGGUAUUCCUAAACC | 160 |
| 5-1051dt | GUUUAUGAACUGACGUUAAdTdT | 161 |
| S-1052dt | GUGUUAGACGGUACCGACAdTdT | 162 |
| S-1053dt | AUAUCAGUAAAGAGAUUAAdTdT | 163 |
| S-1054dt | GGUUUAUGAACUGACGUUAdTdT | 164 |
| S-1055dt | CCACAAUGUUGUGACCGGAdTdT | 165 |
| S-1056dt | GUCACAAAGAACCGUGCAAdTdT | 166 |
| S-1057dt | CAUUGGAAUUCCUAAAAUCdTdT | 167 |
| S-1058 | CCUGCUAGCUCCAUGCUUGCU | 168 |
| S-1059 | CCUGCUAGCUCCAUGCUUGAU | 169 |
| S-1060 | CCUGCUAGCUCCAUGCUUAUU | 170 |
| S-1061 | CCUGCUAGCUCCAUGCUUGUU | 171 |
| S-1062 | UUCGAGUCCCUCAAGUAGCU | 172 |
| S-1063 | UUCGAGUCCCUCAAGUAGCUUU | 173 |
| S-1064 | UCGAGUCCCUCAAGUCCAUUCU | 174 |
| S-1065 | UUCCAGUCCAUCAAGUCAAUU | 175 |
| S-1066 | UUCCGAGUCUAAAAGUCCUUGG | 176 |
| S-1067 | UUCCGAGUCUAAAAGUCCUUGGC | 177 |
| S-1068 | CUUCCGAGUCUAAAAGUCCUUGG | 178 |
| S-1069 | UUCCGAGUCUAAAAGUCCUUGGU | 179 |
| S-1070 | UUCCGAGUCUAAAAGUCCUUGGCU | 180 |
| S-1071 | UCCAAUGUGAAACUUCAUCGGCU | 181 |
| S-1072 | UCCAAUGUGAAACUUCAUCGGC | 182 |
| S-1073 | AUCCAAUGUGAAACUUCAUCGU | 183 |
| S-1074 | AUCCAAUGUGAAACUUCAUCGGU | 184 |
| S-1075 | UCCAAUGUGAAACUUCAUCGGU | 185 |
| S-1076 | UCCAAUGUGAAACUUCAUCGGCUU | 186 |
| S-1077 | AUCUACUGUGAAAAUUCAUCGG | 187 |
| S-1078 | UCUACUGUGAAAAUUCAUCGG | 188 |
| S-1079 | UCUACUGUGAAAAUUCAUCGGC | 189 |
| S-1080 | AUCUACUGUGAAAAUUCAUCGGU | 190 |
| S-1081 | UCUACUGUGAAAAUUCAUCGGU | 191 |
| S-1082 | UCUACUGUGAAAAUUCAUCGGCU | 192 |
| S-1083 | CCUUCGGUCCUCAAGUCCUUCA | 193 |
| S-1084 | UUCGAGUCCAUCAAAUCCUAUAGU | 194 |
| S-1085 | UACAAUGUGUGCACUUCAUAU | 195 |
| S-1086 | UAUACUGUGUGCAAUUCAUUUCU | 196 |
| S-1087 | GCAAUUCAGUCUCGUUGUCC | 197 |
| S-1088 | GCAAUUCAGUCUCGUUGUC | 198 |
| S-1089 | CAAUUCAGUCUCGUUGUCCC | 199 |
| S-1090 | CAAUUCAGUCUCGUUGUCC | 200 |
| S-1091 | GCAAUUCAGUCUCGUUGUGC | 201 |
| S-1092 | CAAUUCAGUCUCGUUGUGCC | 202 |
| S-1093 | CCACAAUGUUGUGACUGGGCCU | 203 |
| S-1094 | CCACAAUGUUGUGACUGGGC | 204 |
| S-1095 | CACAAUGUUGUGACUGGGCC | 205 |
| S-1096 | UGAACCUCUUGUUAUAAAGCCU | 206 |
| S-1097 | UGAACCUCUUGUUAUAAAGC | 207 |
| S-1098 | GAACCUCUUGUUAUAAAGCC | 208 |
| S-1099 | CCUGCUAGCUCCAUGCUUGCCU | 209 |
| S-1100 | CCUGCUAGCUCCAUGCUUGC | 210 |
| S-1101 | CCUGCUAGCUCCAUGCUUG | 211 |
| S-1102 | CUGCUAGCUCCAUGCUUGCC | 212 |
| S-1103 | CCGACAACCAGUAUUUGGGCCU | 213 |
| S-1104 | CCGACAACCAGUAUUUGGGC | 214 |
| S-1105 | CCGACAACCAGUAUUUGGG | 215 |
| S-1106 | CGACAACCAGUAUUUGGGCC | 216 |
| S-1107 | CGACAACCAGUAUUUGGGC | 217 |
| S-1108 | GCAAUUCAGUCUCGUUGUACCU | 218 |
| S-1109 | GCAAUUCAGUCUCGUUGUAC | 219 |
| S-1110 | GCAAUUCAGUCUCGUUGUA | 220 |
| S-1111 | CAAUUCAGUCUCGUUGUACC | 221 |
| S-1112 | GCAAUUCAGACUCGUUGUACCU | 222 |
| S-1113 | GCAAUUCAGACUCGUUGUAC | 223 |
| S-1114 | GCAAUUCAGACUCGUUGUA | 224 |
| S-1115 | CAAUUCAGACUCGUUGUACC | 225 |
| S-1116 | AGCAAUUCAGUCUCGUUGUACC | 226 |
| S-1117 | AGCAAUUCAGUCUCGUUGUAC | 227 |
| S-1118 | AGGUUUAUGAACUGACGUUAC | 228 |
| S-1119 | AGGUUUAUGAACUGACGUUACC | 229 |
| S-1120 | ACCACAAUGUUGUGACUGGAC | 230 |
| S-1121 | ACCACAAUGUUGUGACUGGACC | 231 |
| S-1122 | CCACAAUGUUGUGACUGGACCGU | 232 |
| S-1123 | CCACAAUGUUGUGACUGGACCG | 233 |
| S-1124 | CCACAAUGUUGUGACUGGAC | 234 |
| S-1125 | CACAAUGUUGUGACUGGACC | 235 |
| S-1126 | ACCUGCUAGCUCCAUGCUUCCC | 236 |
| S-1127 | ACCUGCUAGCUCCAUGCUUCC | 237 |
| S-1128 | ACCUGCUAGCUCCAUGCUUC | 238 |
| S-1129 | CCUGCUAGCUCCAUGCUUCC | 239 |
| S-1130 | CCUGCUAGCUCCAUGCUUC | 240 |
| S-1131 | CUGCUAGCUCCAUGCUUCCC | 241 |
| S-1132 | CUGCUAGCUCCAUGCUUCC | 242 |
| S-1133 | ACCGACAACCAGUAUUUGGACC | 243 |
| S-1134 | ACCGACAACCAGUAUUUGGAC | 244 |
| S-1135 | CCGACAACCAGUAUUUGGACCGU | 245 |
| S-1136 | CCGACAACCAGUAUUUGGACCGU | 246 |
| S-1137 | CCGACAACCAGUAUUUGGAC | 247 |
| S-1138 | CGACAACCAGUAUUUGGACC | 248 |
| S-1139 | CCUGCUAGCACCGUGCUUACC | 249 |

[0098] In one embodiment, the siRNA molecules of the present invention may comprise an antisense sequence from Table 1 and a sense sequence from Table 2, or a fragment or variant thereof. As a non-limiting example, the antisense sequence and the sense sequence have at least 30%, 40%, 50%, 60%, 70%, 80%, 81%, 82%, 83%, 84%, 85%, 86%, 87%, 88%, 89%, 90%, 91%, 92%, 93%, 94%, 95%, 96%, 97%, 98% or 99% or at least 20-30%, 20-40%, 20-50%, 20-60%, 20-70%, 20-80%, 20-90%, 20-95%, 20-99%, 30-40%, 30-50%, 30-60%, 30-70%, 30-80%, 30-90%, 30-95%, 30-99%, 40-50%, 40-60%, 40-70%, 40-80%, 40-90%, 40-95%, 40-99%, 50-60%, 50-70%, 50-80%, 50-90%, 50-95%, 50-99%, 60-70%, 60-80%, 60-90%, 60-95%, 60-99%, 70-80%, 70-90%, 70-95%, 70-99%, 80-90%, 80-95%, 80-99%, 90-95%, 90-99% or 95-99% complementarity.

[0099] In one embodiment, the siRNA molecules of the present invention may comprise the sense and antisense siRNA duplex as described in Tables 3-5. As a non-limiting example, these siRNA duplexes may be tested for in vitro inhibitory activity on endogenous HTT gene expression.

TABLE 3
Sense and antisense strand sequences of HTT dsRNA

| siRNA | | | | SS | | | | AS |
|---|---|---|---|---|---|---|---|---|
| Duplex | SS | Start | Sense Strand | SEQ | | Start | Antisense Strand | SEQ |
| ID | ID | SS | Sequence (5′-3′) | ID | AS ID | AS | Sequence (5′-3′) | ID |
| D-3566 | S- | 6751 | CCUGCUAGCUC | 168 | A-2002 | 6751 | UAAGCAUGGAG | 7 |
| | 1058 | | CAUGCUUGCU | | | | CUAGCAGGUU | |
| D-3567 | S- | 6751 | CCUGCUAGCUC | 168 | A-2014 | 6748 | UAAGCAUGGAG | 29 |
| | 1058 | | CAUGCUUGCU | | | | CUAGCAGGCUU | |
| D-3568 | S- | 6751 | CCUGCUAGCUC | 169 | A-2002 | 6751 | UAAGCAUGGAG | 7 |
| | 1059 | | CAUGCUUGAU | | | | CUAGCAGGUU | |
| D-3569 | S- | 6751 | CCUGCUAGCUC | 170 | A-2015 | 6751 | UAAGCAUGGAG | 30 |
| | 1060 | | CAUGCUUAUU | | | | CUAGCAGGGU | |
| D-3570 | S- | 6751 | CCUGCUAGCUC | 171 | A-2002 | 6751 | UAAGCAUGGAG | 7 |
| | 1061 | | CAUGCUUGUU | | | | CUAGCAGGUU | |
| D-3500 | S- | 1386 | UCCAGGUUUAU | 120 | A-2004 | 1386 | UUCAGUUCAUA | 11 |
| | 1016 | | GAACUGACCC | | | | AACCUGGAUU | |
| D-3501 | S- | 1386 | UCCAGGUUUAU | 127 | A-2004 | 1386 | UUCAGUUCAUA | 11 |
| | 1023 | | GAACUGAGCC | | | | AACCUGGAUU | |
| D-3502 | S- | 1386 | UCCAGGUUUAU | 135 | A-2004 | 1386 | UUCAGUUCAUA | 11 |
| | 1030 | | GAACUGAACC | | | | AACCUGGAUU | |
| D-3503 | S- | 1386 | UCCAGGUUUUU | 145 | A-2004 | 1386 | UUCAGUUCAUA | 11 |
| | 1037 | | GAACUGAACC | | | | AACCUGGAUU | |
| D-3504 | S- | 1386 | UCCAGGUUUAU | 135 | A-2001 | 2066 | UGUCGGUACCG | 5 |
| | 1030 | | GAACUGAACC | | | | UCUAACACUU | |
| D-3505 | S- | 1390 | GGUUUAUGAAC | 121 | A-2005 | 1389 | UAACGUCAGUU | 13 |
| | 1017 | | UGACGUUCCC | | | | CAUAAACCUU | |
| D-3506 | S- | 1390 | GGUUUAUGAAC | 128 | A-2005 | 1389 | UAACGUCAGUU | 13 |
| | 1024 | | UGACGUUGCC | | | | CAUAAACCUU | |
| D-3507 | S- | 1390 | GGUUUAUGAAC | 137 | A-2005 | 1389 | UAACGUCAGUU | 13 |
| | 1031 | | UGACGUUACC | | | | CAUAAACCUU | |
| D-3508 | S- | 1390 | GGUUUAUGAUC | 146 | A-2005 | 1389 | UAACGUCAGUU | 13 |
| | 1038 | | UGACGUUACC | | | | CAUAAACCUU | |
| D-3509 | S- | 1391 | GUUUAUGAACU | 103 | A-2000 | 1391 | UUAACGUCAGU | 3 |
| | 1000 | | GAUCUUACCC | | | | UCAUAAACUU | |
| D-3510 | S- | 1391 | GUUUAUGAACU | 106 | A-2000 | 1391 | UUAACGUCAGU | 3 |
| | 1003 | | GAUCUUAGCC | | | | UCAUAAACUU | |
| D-3511 | S- | 1391 | GUUUAUGAAG | 109 | A-2000 | 1391 | UUAACGUCAGU | 3 |
| | 1006 | | UGAUCUUAACC | | | | UCAUAAACUU | |
| D-3512 | S- | 1391 | GUUUAUGAACU | 112 | A-2000 | 1391 | UUAACGUCAGU | 3 |
| | 1009 | | GAUCUUAACC | | | | UCAUAAACUU | |
| D-3513 | S- | 1391 | GUUUAUGAACU | 116 | A-2000 | 1391 | UUAACGUCAGU | 3 |
| | 1012 | | GAUCUUGCCC | | | | UCAUAAACUU | |
| D-3514 | S- | 1391 | GUUUAUGAACU | 117 | A-2000 | 1391 | UUAACGUCAGU | 3 |
| | 1013 | | GAUCUUGGCC | | | | UCAUAAACUU | |
| D-3515 | S- | 1391 | GUUUAUGAACU | 118 | A-2000 | 1391 | UUAACGUCAGU | 3 |
| | 1014 | | GAUCUUGACC | | | | UCAUAAACUU | |
| D-3516 | S- | 1429 | CCACAAUGUUG | 122 | A-2006 | 1428 | UCCGGUCACAA | 15 |
| | 1018 | | UGACUGGCCC | | | | CAUUGUGGUU | |
| D-3517 | S- | 1429 | CCACAAUGUUG | 129 | A-2006 | 1428 | UCCGGUCACAA | 15 |
| | 1025 | | UGACUGGGCC | | | | CAUUGUGGUU | |
| D-3518 | S- | 1429 | CCACAAUGUUG | 138 | A-2006 | 1428 | UCCGGUCACAA | 15 |
| | 1032 | | UGACUGGACC | | | | CAUUGUGGUU | |
| D-3519 | S- | 1429 | CCACAAUGUAG | 147 | A-2006 | 1428 | UCCGGUCACAA | 15 |
| | 1039 | | UGACUGGACC | | | | CAUUGUGGUU | |
| D-3520 | S- | 2066 | GUGUUAGACGG | 104 | A-2001 | 2066 | UGUCGGUACCG | 5 |
| | 1001 | | UACUGAUCCC | | | | UCUAACACUU | |
| D-3521 | S- | 2066 | GUGUUAGACGG | 107 | A-2001 | 2066 | UGUCGGUACCG | 5 |
| | 1004 | | UACUGAUGCC | | | | UCUAACACUU | |
| D-3522 | S- | 2066 | GUGUUAGACCG | 110 | A-2001 | 2066 | UGUCGGUACCG | 5 |
| | 1007 | | UACUGAUACC | | | | UCUAACACUU | |
| D-3523 | S- | 2066 | GUGUUAGACGG | 113 | A-2001 | 2066 | UGUCGGUACCG | 5 |
| | 1010 | | UACUGAUACC | | | | UCUAACACUU | |
| D-3524 | S- | 2079 | CCGACAACCAG | 125 | A-2009 | 2078 | UCCAAAUACUG | 21 |
| | 1021 | | UAUUUGGCCC | | | | GUUGUCGGUU | |
| D-3525 | S- | 2079 | CCGACAACCAG | 132 | A-2009 | 2078 | UCCAAAUACUG | 21 |
| | 1028 | | UAUUUGGGCC | | | | GUUGUCGGUU | |
| D-3526 | S- | 2079 | CCGACAACCAG | 142 | A-2009 | 2078 | UCCAAAUACUG | 21 |
| | 1035 | | UAUUUGGACC | | | | GUUGUCGGUU | |
| D-3527 | S- | 2079 | CCGACAACCUG | 150 | A-2009 | 2078 | UCCAAAUACUG | 21 |
| | 1042 | | UAUUUGGACC | | | | GUUGUCGGUU | |
| D-3528 | S- | 4544 | GUCACAAAGAA | 123 | A-2007 | 4544 | UUGCACGGUUC | 17 |
| | 1019 | | CCGUGUACCC | | | | UUUGUGACUU | |
| D-3529 | S- | 4544 | GUCACAAAGAA | 130 | A-2007 | 4544 | UUGCACGGUUC | 17 |
| | 1026 | | CCGUGUAGCC | | | | UUUGUGACUU | |
| D-3530 | S- | 4544 | GUCACAAAGAA | 139 | A-2007 | 4544 | UUGCACGGUUC | 17 |
| | 1033 | | CCGUGUAACC | | | | UUUGUGACUU | |
| D-3531 | S- | 4544 | GUCACAAAGUA | 148 | A-2007 | 4544 | UUGCACGGUUC | 17 |
| | 1040 | | CCGUGUAACC | | | | UUUGUGACUU | |
| D-3532 | S- | 4597 | UGAACCUCUUG | 124 | A-2008 | 4597 | UUUUAUAACAA | 19 |
| | 1020 | | UUAUAAACCC | | | | GAGGUUCAUU | |
| D-3533 | S- | 4597 | UGAACCUCUUG | 131 | A-2008 | 4597 | UUUUAUAACAA | 19 |
| | 1027 | | UUAUAAAGCC | | | | GAGGUUCAUU | |
| D-3534 | S- | 4597 | UGAACCUCUUG | 140 | A-2008 | 4597 | UUUUAUAACAA | 19 |
| | 1034 | | UUAUAAAACC | | | | GAGGUUCAUU | |
| D-3535 | S- | 4597 | UGAACCUCUAG | 149 | A-2008 | 4597 | UUUUAUAACAA | 19 |
| | 1041 | | UUAUAAAACC | | | | GAGGUUCAUU | |
| D-3536 | S- | 4861 | GAUCAUUGGAA | 152 | A-2011 | 4860 | UUUAGGAAUUC | 25 |
| | 1044 | | UUCCUAAUCC | | | | CAAUGAUCUU | |
| D-3537 | S- | 4861 | GAUCAUUGGAA | 154 | A-2011 | 4860 | UUUAGGAAUUC | 25 |
| | 1046 | | UUCCUAAGCC | | | | CAAUGAUCUU | |
| D-3538 | S- | 4861 | GAUCAUUGGAA | 157 | A-2011 | 4860 | UUUAGGAAUUC | 25 |
| | 1048 | | UUCCUAAACC | | | | CAAUGAUCUU | |
| D-3539 | S- | 4861 | GAUCAUUGGUA | 160 | A-2011 | 4860 | UUUAGGAAUUC | 25 |
| | 1050 | | UUCCUAAACC | | | | CAAUGAUCUU | |
| D-3540 | S- | 4864 | CAUUGGAAUUC | 151 | A-2010 | 4864 | UAUUUUAGGA | 23 |
| | 1043 | | CUAAAAUUCC | | | | AUUCCAAUGUU | |
| D-3541 | S- | 4864 | CAUUGGAAUUC | 153 | A-2010 | 4864 | UAUUUUAGGA | 23 |
| | 1045 | | CUAAAAUGCC | | | | AUUCCAAUGUU | |
| D-3542 | S- | 4864 | CAUUGGAAUUC | 155 | A-2010 | 4864 | UAUUUUAGGA | 23 |
| | 1047 | | CUAAAAUACC | | | | AUUCCAAUGUU | |
| D-3543 | S- | 4864 | CAUUGGAAUAC | 159 | A-2010 | 4864 | UAUUUUAGGA | 23 |
| | 1049 | | CUAAAAUACC | | | | AUUCCAAUGUU | |
| D-3544 | S- | 6188 | GCAAUUCAGUC | 119 | A-2003 | 6188 | UACAACGAGAC | 9 |
| | 1015 | | UCGUUGUCCC | | | | UGAAUUGCUU | |
| D-3545 | S- | 6188 | GCAAUUCAGUC | 126 | A-2003 | 6188 | UACAACGAGAC | 9 |
| | 1022 | | UCGUUGUGCC | | | | UGAAUUGCUU | |
| D-3546 | S- | 6188 | GCAAUUCAGUC | 133 | A-2003 | 6188 | UACAACGAGAC | 9 |
| | 1029 | | UCGUUGUACC | | | | UGAAUUGCUU | |
| D-3547 | S- | 6188 | GCAAUUCAGAC | 144 | A-2003 | 6188 | UACAACGAGAC | 9 |
| | 1036 | | UCGUUGUACC | | | | UGAAUUGCUU | |
| D-3548 | S- | 6751 | CCUGCUAGCUC | 105 | A-2002 | 6751 | UAAGCAUGGAG | 7 |
| | 1002 | | CAUGCUUCCC | | | | CUAGCAGGUU | |
| D-3549 | S- | 6751 | CCUGCUAGCUC | 108 | A-2002 | 6751 | UAAGCAUGGAG | 7 |
| | 1005 | | CAUGCUUGCC | | | | CUAGCAGGUU | |
| D-3550 | S- | 6751 | CCUGCUAGCAC | 111 | A-2002 | 6751 | UAAGCAUGGAG | 7 |
| | 1008 | | CAUGCUUACC | | | | CUAGCAGGUU | |
| D-3551 | S- | 6751 | CCUGCUAGCUC | 114 | A-2002 | 6751 | UAAGCAUGGAG | 7 |
| | 1011 | | CAUGCUUACC | | | | CUAGCAGGUU | |

TABLE 4
Sense and antisense strand sequences of HTT dsRNA

| siRNA | | | | SS | | | | AS |
|---|---|---|---|---|---|---|---|---|
| Duplex | | Start | Sense Strand | SEQ | | Start | Antisense Strand | SEQ |
| ID | SS ID | SS | Sequence (5′-3′) | ID | AS ID | AS | Sequence (5′-3′) | ID |
| D-3552 | S-1051dt | 1391 | GUUUAUGAACUG | 161 | A- | 1391 | UUAACGUCAGU | 4 |
| | | | ACGUUAAdTdT | | 2000dt | | UCAUAAACdTdT | |
| D-3553 | S-1052dt | 2066 | GUGUUAGACGGU | 162 | A- | 2066 | UGUCGGUACCG | 6 |
| | | | ACCGACAdTdT | | 2001dt | | UCUAACACdTdT | |
| D-3554 | S-1011dt | 6751 | CCUGCUAGCUCC | 115 | A- | 6751 | UAAGCAUGGAG | 8 |
| | | | AUGCUUAdTdT | | 2002dt | | CUAGCAGGdTdT | |
| D-3555 | S-1053dt | 10322 | AUAUCAGUAAAG | 163 | A- | 10322 | UUAAUCUCUUU | 27 |
| | | | AGAUUAAdTdT | | 2012dt | | ACUGAUAUdTdT | |
| D-3556 | S-1030dt | 1386 | UCCAGGUUUAUG | 136 | A- | 1386 | UUCAGUUCAUA | 12 |
| | | | AACUGAAdTdT | | 2004dt | | AACCUGGAdTdT | |
| D-3557 | S-1054dt | 1390 | GGUUUAUGAACU | 164 | A- | 1390 | UAACGUCAGUU | 14 |
| | | | GACGUUAdTdT | | 2005dt | | CAUAAACCdTdT | |
| D-3558 | S-1055dt | 1429 | CCACAAUGUUGU | 165 | A- | 1429 | UCCGGUCACAA | 16 |
| | | | GACCGGAdTdT | | 2006dt | | CAUUGUGGdTdT | |
| D-3559 | S-1035dt | 2079 | CCGACAACCAGU | 143 | A- | 2079 | UCCAAAUACUG | 22 |
| | | | AUUUGGAdTdT | | 2009dt | | GUUGUCGGdTdT | |
| D-3560 | S-1056dt | 4544 | GUCACAAAGAAC | 166 | A- | 4544 | UUGCACGGUUC | 18 |
| | | | CGUGCAAdTdT | | 2007dt | | UUUGUGACdTdT | |
| D-3561 | S-1034dt | 4597 | UGAACCUCUUGU | 141 | A- | 4597 | UUUUAUAACAA | 20 |
| | | | UAUAAAAdTdT | | 2008dt | | GAGGUUCAdTdT | |
| D-3562 | S-1029dt | 6188 | GCAAUUCAGUCU | 134 | A- | 6188 | UACAACGAGAC | 10 |
| | | | CGUUGUAdTdT | | 2003dt | | UGAAUUGCdTdT | |
| D-3563 | S-1047dt | 4864 | CAUUGGAAUUCC | 156 | A- | 4864 | UAUUUUAGGAA | 24 |
| | | | UAAAAUAdTdT | | 2010dt | | UUCCAAUGdTdT | |
| D-3564 | S-1048dt | 4861 | GAUCAUUGGAAU | 158 | A- | 4861 | UUUAGGAAUUC | 26 |
| | | | UCCUAAAdTdT | | 2011dt | | CAAUGAUCdTdT | |
| D-3565 | S-1057dt | 4864 | CAUUGGAAUUCC | 167 | A- | 4864 | GAUUUUAGGAA | 28 |
| | | | UAAAAUCdTdT | | 2013dt | | UUCCAAUGdTdT | |

TABLE 5
Antisense and Sense strand sequences of HTT dsRNA

| siRNA | | | | AS | | | | SS |
|---|---|---|---|---|---|---|---|---|
| Duplex | AS | Start | Antisense Strand | SEQ | | Start | Sense Strand | SEQ |
| ID | ID | AS | Sequence (5′-3′) | ID | SS ID | SS | Sequence (5′-3′) | ID |
| D-3569 | S- | 6751 | CCUGCUAGCUC | 170 | A- | 6751 | UAAGCAUGGAG | 30 |
| | 1060 | | CAUGCUUAUU | | 2015 | | CUAGCAGGGU | |
| D-3570 | S- | 6751 | CCUGCUAGCUC | 171 | A- | 6751 | UAAGCAUGGAG | 7 |
| | 1061 | | CAUGCUUGUU | | 2002 | | CUAGCAGGUU | |

[0100] In other embodiments, the siRNA molecules of the present invention can be encoded in plasmid vectors, viral vectors (e.g., AAV vectors), genome or other nucleic acid expression vectors for delivery to a cell.

[0101] DNA expression plasmids can be used to stably express the siRNA duplexes or dsRNA of the present invention in cells and achieve long-term inhibition of the target gene expression. In one aspect, the sense and antisense strands of a siRNA duplex are typically linked by a short spacer sequence leading to the expression of a stem-loop structure termed short hairpin RNA (shRNA). The hairpin is recognized and cleaved by Dicer, thus generating mature siRNA molecules.

[0102] In one embodiment, the sense and antisense strands of a siRNA duplex may be linked by a short spacer sequence, which may optionally be linked to additional flanking sequence, leading to the expression of a flanking arm-stem-loop structure termed primary microRNA (pri-miRNA). The pri-miRNA may be recognized and cleaved by Drosha and Dicer, and thus generate mature siRNA molecules.

[0103] According to the present invention, AAV vectors comprising the nucleic acids encoding the siRNA molecules targeting HTT mRNA are produced, the AAV vector serotypes may be AAV1, AAV2, AAV3, AAV4, AAV5, AAV6, AAV7, AAV8, AAV9, AAV9.47, AAV9 (hu14), AAV10, AAV11, AAV12, AAVrh8, AAVrh10, AAV-DJ8, AAV-DJ, AAV-PHP.A (PHP.A), and/or AAV-PHP.B (PHP.B) and variants thereof.

[0104] In some embodiments, the siRNA duplexes or encoded dsRNA of the present invention suppress (or degrade) target mRNA (e.g., HTT). Accordingly, the siRNA duplexes or encoded dsRNA can be used to substantially inhibit HTT gene expression in a cell, for example a neuron. In some aspects, the inhibition of HTT gene expression refers to an inhibition by at least about 20%, preferably by at least about 30%, 40%, 50%, 60%, 70%, 80%, 85%, 90%, 95% and 100%, or at least 20-30%, 20-40%, 20-50%, 20-60%, 20-70%, 20-80%, 20-90%, 20-95%, 20-100%, 30-40%, 30-50%, 30-60%, 30-70%, 30-80%, 30-90%, 30-95%, 30-100%, 40-50%, 40-60%, 40-70%, 40-80%, 40-90%, 40-95%, 40-100%, 50-60%, 50-70%, 50-80%, 50-90%, 50-95%, 50-100%, 60-70%, 60-80%, 60-90%, 60-95%, 60-100%, 70-80%, 70-90%, 70-95%, 70-100%, 80-90%, 80-95%, 80-100%, 90-95%, 90-100% or 95-100%. Accordingly, the protein product of the targeted gene may be inhibited by at least about 20%, preferably by at least about 30%, 40%, 50%, 60%, 70%, 80%, 85%, 90%, 95% and 100%, or at least 20-30%, 20-40%, 20-50%, 20-60%, 20-70%, 20-80%, 20-90%, 20-95%, 20-100%, 30-40%, 30-50%, 30-60%, 30-70%, 30-80%, 30-90%, 30-95%, 30-100%, 40-50%, 40-60%, 40-70%, 40-80%, 40-90%, 40-95%, 40-100%, 50-60%, 50-70%, 50-80%, 50-90%, 50-95%, 50-100%, 60-70%, 60-80%, 60-90%, 60-95%, 60-100%, 70-80%, 70-90%, 70-95%, 70-100%, 80-90%, 80-95%, 80-100%, 90-95%, 90-100% or 95-100%.

[0105] According to the present invention, the siRNA molecules are designed and tested for their ability to reduce HTT mRNA levels in cultured cells. Such siRNA molecules may form a duplex such as, but not limited to, include those listed in Table 3, Table 4 or Table 5. As a non-limiting example, the siRNA duplexes may be siRNA duplex IDs: D-3500 to D-3570.

[0106] In one embodiment, the siRNA molecules comprise a miRNA seed match for the target (e.g., HTT) located in the guide strand. In another embodiment, the siRNA molecules comprise a miRNA seed match for the target (e.g., HTT) located in the passenger strand. In yet another embodiment, the siRNA duplexes or encoded dsRNA targeting HTT gene do not comprise a seed match for the target (e.g., HTT) located in the guide or passenger strand.

[0107] In one embodiment, the siRNA duplexes or encoded dsRNA targeting HTT gene may have almost no significant full-length off targets for the guide strand. In another embodiment, the siRNA duplexes or encoded dsRNA targeting HTT gene may have almost no significant full-length off target effects for the passenger strand. The siRNA duplexes or encoded dsRNA targeting HTT gene may have less than 1%, 2%, 3%, 4%, 5%, 6%, 7%, 8%, 9%, 10%, 11%, 12%, 13%, 14%, 15%, 20%, 25%, 30%, 35%, 40%, 45%, 50%, 1-5%, 2-6%, 3-7%, 4-8%, 5-9%, 5-10%, 6-10%, 5-15%, 5-20%, 5-25% 5-30%, 10-20%, 10-30%, 10-40%, 10-50%, 15-30%, 15-40%, 15-45%, 20-40%, 20-50%, 25-50%, 30-40%, 30-50%, 35-50%, 40-50%, 45-50% full-length off target effects for the passenger strand. In yet another embodiment, the siRNA duplexes or encoded dsRNA targeting HTT gene may have almost no significant full-length off targets for the guide strand or the passenger strand. The siRNA duplexes or encoded dsRNA targeting HTT gene may have less than 1%, 2%, 3%, 4%, 5%, 6%, 7%, 8%, 9%, 10%, 11%, 12%, 13%, 14%, 15%, 20%, 25%, 30%, 35%, 40%, 45%, 50%, 1-5%, 2-6%, 3-7%, 4-8%, 5-9%, 5-10%, 6-10%, 5-15%, 5-20%, 5-25% 5-30%, 10-20%, 10-30%, 10-40%, 10-50%, 15-30%, 15-40%, 15-45%, 20-40%, 20-50%, 25-50%, 30-40%, 30-50%, 35-50%, 40-50%, 45-50% full-length off target effects for the guide or passenger strand.

[0108] In one embodiment, the siRNA duplexes or encoded dsRNA targeting HTT gene may have high activity in vitro. In another embodiment, the siRNA molecules may have low activity in vitro. In yet another embodiment, the siRNA duplexes or dsRNA targeting the HTT gene may have high guide strand activity and low passenger strand activity in vitro.

[0109] In one embodiment, the siRNA molecules have a high guide strand activity and low passenger strand activity in vitro. The target knock-down (KD) by the guide strand may be at least 40%, 50%, 60%, 65%, 70%, 75%, 80%, 85%, 90%, 95%, 99%, 99.5% or 100%. The target knock-down by the guide strand may be 40-50%, 45-50%, 50-55%, 50-60%, 60-65%, 60-70%, 60-75%, 60-80%, 60-85%, 60-90%, 60-95%, 60-99%, 60-99.5%, 60-100%, 65-70%, 65-75%, 65-80%, 65-85%, 65-90%, 65-95%, 65-99%, 65-99.5%, 65-100%, 70-75%, 70-80%, 70-85%, 70-90%, 70-95%, 70-99%, 70-99.5%, 70-100%, 75-80%, 75-85%, 75-90%, 75-95%, 75-99%, 75-99.5%, 75-100%, 80-85%, 80-90%, 80-95%, 80-99%, 80-99.5%, 80-100%, 85-90%, 85-95%, 85-99%, 85-99.5%, 85-100%, 90-95%, 90-99%, 90-99.5%, 90-100%, 95-99%, 95-99.5%, 95-100%, 99-99.5%, 99-100% or 99.5-100%. As a non-limiting example, the target knock-down (KD) by the guide strand is greater than 70%. As a non-limiting example, the target knock-down (KD) by the guide strand is greater than 60%.

[0110] In one embodiment, the siRNA duplex is designed so there is no miRNA seed match for the sense or antisense sequence to non-Htt sequences.

[0111] In one embodiment, the IC₅₀ of the guide strand for the nearest off target is greater than 100 multiplied by the IC₅₀ of the guide strand for the target. As a non-limiting example, if the IC₅₀ of the guide strand for the nearest off target is greater than 100 multiplied by the IC₅₀ of the guide strand for the target then the siRNA molecule is said to have high guide strand selectivity for inhibiting Htt in vitro.

[0112] In one embodiment, the 5′ processing of the guide strand has a correct start (n) at the 5′ end at least 75%, 80%, 85%, 90%, 95%, 99% or 100% of the time in vitro or in vivo. As a non-limiting example, the 5′ processing of the guide strand is precise and has a correct start (n) at the 5′ end at least 99% of the time in vitro. As a non-limiting example, the 5′ processing of the guide strand is precise and has a correct start (n) at the 5′ end at least 99% of the time in vivo. As a non-limiting example, the 5′ processing of the guide strand is precise and has a correct start (n) at the 5′ end at least 90% of the time in vitro. As a non-limiting example, the 5′ processing of the guide strand is precise and has a correct start (n) at the 5′ end at least 90% of the time in vivo. As a non-limiting example, the 5′ processing of the guide strand is precise and has a correct start (n) at the 5′ end at least 85% of the time in vitro. As a non-limiting example, the 5′ processing of the guide strand is precise and has a correct start (n) at the 5′ end at least 85% of the time in vivo.

[0113] In one embodiment, the guide to passenger (G:P) (also referred to as the antisense to sense) strand ratio expressed is 1:10, 1:9, 1:8, 1:7, 1:6, 1:5, 1:4, 1:3, 1:2, 1:1, 2:10, 2:9, 2:8, 2:7, 2:6, 2:5, 2:4, 2:3, 2:2, 2:1, 3:10, 3:9, 3:8, 3:7, 3:6, 3:5, 3:4, 3:3, 3:2, 3:1, 4:10, 4:9, 4:8, 4:7, 4:6, 4:5, 4:4, 4:3, 4:2, 4:1, 5:10, 5:9, 5:8, 5:7, 5:6, 5:5, 5:4, 5:3, 5:2, 5:1, 6:10, 6:9, 6:8, 6:7, 6:6, 6:5, 6:4, 6:3, 6:2, 6:1, 7:10, 7:9, 7:8, 7:7, 7:6, 7:5, 7:4, 7:3, 7:2, 7:1, 8:10, 8:9, 8:8, 8:7, 8:6, 8:5, 8:4, 8:3, 8:2, 8:1, 9:10, 9:9, 9:8, 9:7, 9:6, 9:5, 9:4, 9:3, 9:2, 9:1, 10:10, 10:9, 10:8, 10:7, 10:6, 10:5, 10:4, 10:3, 10:2, 10:1, 1:99, 5:95, 10:90, 15:85, 20:80, 25:75, 30:70, 35:65, 40:60, 45:55, 50:50, 55:45, 60:40, 65:35, 70:30, 75:25, 80:20, 85:15, 90:10, 95:5, or 99:1 in vitro or in vivo. The guide to passenger ratio refers to the ratio of the guide strands to the passenger strands after the intracellular processing of the pri-microRNA. For example, a 80:20 guide-to-passenger ratio would have 8 guide strands to every 2 passenger strands processed from the precursor. As a non-limiting example, the guide-to-passenger strand ratio is 8:2 in vitro. As a non-limiting example, the guide-to-passenger strand ratio is 8:2 in vivo. As a non-limiting example, the guide-to-passenger strand ratio is 9:1 in vitro. As a non-limiting example, the guide-to-passenger strand ratio is 9:1 in vivo.

[0114] In one embodiment, the guide to passenger (G:P) (also referred to as the antisense to sense) strand ratio expressed is greater than 1.

[0115] In one embodiment, the guide to passenger (G:P) (also referred to as the antisense to sense) strand ratio expressed is greater than 2.

[0116] In one embodiment, the guide to passenger (G:P) (also referred to as the antisense to sense) strand ratio expressed is greater than 5.

[0117] In one embodiment, the guide to passenger (G:P) (also referred to as the antisense to sense) strand ratio expressed is greater than 10.

[0118] In one embodiment, the guide to passenger (G:P) (also referred to as the antisense to sense) strand ratio expressed is greater than 20.

[0119] In one embodiment, the guide to passenger (G:P) (also referred to as the antisense to sense) strand ratio expressed is greater than 50.

[0120] In one embodiment, the guide to passenger (G:P) (also referred to as the antisense to sense) strand ratio expressed is at least 3:1.

[0121] In one embodiment, the guide to passenger (G:P) (also referred to as the antisense to sense) strand ratio expressed is at least 5:1.

[0122] In one embodiment, the guide to passenger (G:P) (also referred to as the antisense to sense) strand ratio expressed is at least 10:1.

[0123] In one embodiment, the guide to passenger (G:P) (also referred to as the antisense to sense) strand ratio expressed is at least 20:1.

[0124] In one embodiment, the guide to passenger (G:P) (also referred to as the antisense to sense) strand ratio expressed is at least 50:1.

[0125] In one embodiment, the passenger to guide (P:G) (also referred to as the sense to antisense) strand ratio expressed is 1:10, 1:9, 1:8, 1:7, 1:6, 1:5, 1:4, 1:3, 1:2, 1:1, 2:10, 2:9, 2:8, 2:7, 2:6, 2:5, 2:4, 2:3, 2:2, 2:1, 3:10, 3:9, 3:8, 3:7, 3:6, 3:5, 3:4, 3:3, 3:2, 3:1, 4:10, 4:9, 4:8, 4:7, 4:6, 4:5, 4:4, 4:3, 4:2, 4:1, 5:10, 5:9, 5:8, 5:7, 5:6, 5:5, 5:4, 5:3, 5:2, 5:1, 6:10, 6:9, 6:8, 6:7, 6:6, 6:5, 6:4, 6:3, 6:2, 6:1, 7:10, 7:9, 7:8, 7:7, 7:6, 7:5, 7:4, 7:3, 7:2, 7:1, 8:10, 8:9, 8:8, 8:7, 8:6, 8:5, 8:4, 8:3, 8:2, 8:1, 9:10, 9:9, 9:8, 9:7, 9:6, 9:5, 9:4, 9:3, 9:2, 9:1, 10:10, 10:9, 10:8, 10:7, 10:6, 10:5, 10:4, 10:3, 10:2, 10:1, 1:99, 5:95, 10:90, 15:85, 20:80, 25:75, 30:70, 35:65, 40:60, 45:55, 50:50, 55:45, 60:40, 65:35, 70:30, 75:25, 80:20, 85:15, 90:10, 95:5, or 99:1 in vitro or in vivo. The passenger to guide ratio refers to the ratio of the passenger strands to the guide strands after the excision of the guide strand. For example, a 80:20 passenger to guide ratio would have 8 passenger strands to every 2 guide strands processed from the precursor. As a non-limiting example, the passenger-to-guide strand ratio is 80:20 in vitro. As a non-limiting example, the passenger-to-guide strand ratio is 80:20 in vivo. As a non-limiting example, the passenger-to-guide strand ratio is 8:2 in vitro. As a non-limiting example, the passenger-to-guide strand ratio is 8:2 in vivo. As a non-limiting example, the passenger-to-guide strand ratio is 9:1 in vitro. As a non-limiting example, the passenger-to-guide strand ratio is 9:1 in vivo.

[0126] In one embodiment, the passenger to guide (P:G) (also referred to as the sense to antisense) strand ratio expressed is greater than 1.

[0127] In one embodiment, the passenger to guide (P:G) (also referred to as the sense to antisense) strand ratio expressed is greater than 2.

[0128] In one embodiment, the passenger to guide (P:G) (also referred to as the sense to antisense) strand ratio expressed is greater than 5.

[0129] In one embodiment, the passenger to guide (P:G) (also referred to as the sense to antisense) strand ratio expressed is greater than 10.

[0130] In one embodiment, the passenger to guide (P:G) (also referred to as the sense to antisense) strand ratio expressed is greater than 20.

[0131] In one embodiment, the passenger to guide (P:G) (also referred to as the sense to antisense) strand ratio expressed is greater than 50.

[0132] In one embodiment, the passenger to guide (P:G) (also referred to as the sense to antisense) strand ratio expressed is at least 3:1.

[0133] In one embodiment, the passenger to guide (P:G) (also referred to as the sense to antisense) strand ratio expressed is at least 5:1.

[0134] In one embodiment, the passenger to guide (P:G) (also referred to as the sense to antisense) strand ratio expressed is at least 10:1.

[0135] In one embodiment, the passenger to guide (P:G) (also referred to as the sense to antisense) strand ratio expressed is at least 20:1.

[0136] In one embodiment, the passenger to guide (P:G) (also referred to as the sense to antisense) strand ratio expressed is at least 50:1.

[0137] In one embodiment, a passenger-guide strand duplex is considered effective when the pri- or pre-microRNAs demonstrate, but methods known in the art and described herein, greater than 2-fold guide to passenger strand ratio when processing is measured. As a non-limiting examples, the pri- or pre-microRNAs demonstrate great than 2-fold, 3-fold, 4-fold, 5-fold, 6-fold, 7-fold, 8-fold, 9-fold, 10-fold, 11-fold, 12-fold, 13-fold, 14-fold, 15-fold, or 2 to 5-fold, 2 to 10-fold, 2 to 15-fold, 3 to 5-fold, 3 to 10-fold, 3 to 15-fold, 4 to 5-fold, 4 to 10-fold, 4 to 15-fold, 5 to 10-fold, 5 to 15-fold, 6 to 10-fold, 6 to 15-fold, 7 to 10-fold, 7 to 15-fold, 8 to 10-fold, 8 to 15-fold, 9 to 10-fold, 9 to 15-fold, 10 to 15-fold, 11 to 15-fold, 12 to 15-fold, 13 to 15-fold, or 14 to 15-fold guide to passenger strand ratio when processing is measured.

[0138] In one embodiment, the vector genome encoding the dsRNA comprises a sequence which is at least 60%, 65%, 70%, 75%, 80%, 85%, 90%, 95%, 99% or more than 99% of the full length of the construct. As a non-limiting example, the vector genome comprises a sequence which is at least 80% of the full length sequence of the construct.

[0139] In one embodiment, the siRNA molecules may be used to silence wild type or mutant HTT by targeting at least one exon on the htt sequence. The exon may be exon 1, exon 2, exon 3, exon 4, exon 5, exon 6, exon 7, exon 8, exon 9, exon 10, exon 11, exon 12, exon 13, exon 14, exon 15, exon 16, exon 17, exon 18, exon 19, exon 20, exon 21, exon 22, exon 23, exon 24, exon 25, exon 26, exon 27, exon 28, exon 29, exon 30, exon 31, exon 32, exon 33, exon 34, exon 35, exon 36, exon 37, exon 38, exon 39, exon 40, exon 41, exon 42, exon 43, exon 44, exon 45, exon 46, exon 47, exon 48, exon 49, exon 50, exon 51, exon 52, exon 53, exon 54, exon 55, exon 56, exon 57, exon 58, exon 59, exon 60, exon 61, exon 62, exon 63, exon 64, exon 65, exon 66, and/or exon 67. As a non-limiting example, the siRNA molecules may be used to silence wild type or mutant HTT by targeting exon 1. As another non-limiting example, the siRNA molecules may be used to silence wild type or mutant HTT by targeting an exon other than exon 1. As another non-limiting example, the siRNA molecules may be used to silence wild type or mutant HTT by targeting exon 50. As another non-limiting example, the siRNA molecules may be used to silence wild type or mutant HTT by targeting exon 67.

[0140] In one embodiment, the siRNA molecules may be used to silence wild type and/or mutant HTT by targeting at least one exon on the htt sequence. The exon may be exon 1, exon 2, exon 3, exon 4, exon 5, exon 6, exon 7, exon 8, exon 9, exon 10, exon 11, exon 12, exon 13, exon 14, exon 15, exon 16, exon 17, exon 18, exon 19, exon 20, exon 21, exon 22, exon 23, exon 24, exon 25, exon 26, exon 27, exon 28, exon 29, exon 30, exon 31, exon 32, exon 33, exon 34, exon 35, exon 36, exon 37, exon 38, exon 39, exon 40, exon 41, exon 42, exon 43, exon 44, exon 45, exon 46, exon 47, exon 48, exon 49, exon 50, exon 51, exon 52, exon 53, exon 54, exon 55, exon 56, exon 57, exon 58, exon 59, exon 60, exon 61, exon 62, exon 63, exon 64, exon 65, exon 66, and/or exon 67. As a non-limiting example, the siRNA molecules may be used to silence wild type and/or mutant HTT by targeting exon 1. As another non-limiting example, the siRNA molecules may be used to silence wild type and/or mutant HTT by targeting an exon other than exon 1. As another non-limiting example, the siRNA molecules may be used to silence wild type and/or mutant HTT by targeting exon 50. As another non-limiting example, the siRNA molecules may be used to silence wild type and/or mutant HTT by targeting exon 67.

siRNA Modification

[0141] In some embodiments, the siRNA molecules of the present invention, when not delivered as a precursor or DNA, may be chemically modified to modulate some features of RNA molecules, such as, but not limited to, increasing the stability of siRNAs in vivo. The chemically modified siRNA molecules can be used in human therapeutic applications, and are improved without compromising the RNAi activity of the siRNA molecules. As a non-limiting example, the siRNA molecules modified at both the 3′ and the 5′ end of both the sense strand and the antisense strand.

[0142] In some aspects, the siRNA duplexes of the present invention may contain one or more modified nucleotides such as, but not limited to, sugar modified nucleotides, nucleobase modifications and/or backbone modifications. In some aspects, the siRNA molecule may contain combined modifications, for example, combined nucleobase and backbone modifications.

[0143] In one embodiment, the modified nucleotide may be a sugar-modified nucleotide. Sugar modified nucleotides include, but are not limited to 2′-fluoro, 2′-amino and 2′-thio modified ribonucleotides, e.g. 2′-fluoro modified ribonucleotides. Modified nucleotides may be modified on the sugar moiety, as well as nucleotides having sugars or analogs thereof that are not ribosyl. For example, the sugar moieties may be, or be based on, mannoses, arabinoses, glucopyranoses, galactopyranoses, 4′-thioribose, and other sugars, heterocycles, or carbocycles.

[0144] In one embodiment, the modified nucleotide may be a nucleobase-modified nucleotide.

[0145] In one embodiment, the modified nucleotide may be a backbone-modified nucleotide. In some embodiments, the siRNA duplexes of the present invention may further comprise other modifications on the backbone. A normal “backbone”, as used herein, refers to the repeating alternating sugar-phosphate sequences in a DNA or RNA molecule. The deoxyribose/ribose sugars are joined at both the 3′-hydroxyl and 5′-hydroxyl groups to phosphate groups in ester links, also known as “phosphodiester” bonds/linker (PO linkage). The PO backbones may be modified as “phosphorothioate backbone (PS linkage). In some cases, the natural phosphodiester bonds may be replaced by amide bonds but the four atoms between two sugar units are kept. Such amide modifications can facilitate the solid phase synthesis of oligonucleotides and increase the thermodynamic stability of a duplex formed with siRNA complement. Sec e.g. Mesmacker et al., Pure & Appl. Chem., 1997, 3, 437-440; the content of which is incorporated herein by reference in its entirety.

[0146] Modified bases refer to nucleotide bases such as, for example, adenine, guanine, cytosine, thymine, uracil, xanthine, inosine, and queuosine that have been modified by the replacement or addition of one or more atoms or groups. Some examples of modifications on the nucleobase moieties include, but are not limited to, alkylated, halogenated, thiolated, aminated, amidated, or acetylated bases, individually or in combination. More specific examples include, for example, 5-propynyluridine, 5-propynylcytidine, 6-methyladenine, 6-methylguanine, N,N,-dimethyladenine, 2-propyladenine, 2-propylguanine, 2-aminoadenine, 1-methylinosine, 3-methyluridine, 5-methylcytidine, 5-methyluridine and other nucleotides having a modification at the 5 position, 5-(2-amino) propyl uridine, 5-halocytidine, 5-halouridine, 4-acetylcytidine, 1-methyladenosine, 2-methyladenosine, 3-methylcytidine, 6-methyluridine, 2-methylguanosine, 7-methylguanosine, 2,2-dimethylguanosine, 5-methylaminoethyluridine, 5-methyloxyuridine, deazanucleotides such as 7-deaza-adenosine, 6-azouridine, 6-azocytidine, 6-azothymidine, 5-methyl-2-thiouridine, other thio bases such as 2-thiouridine and 4-thiouridine and 2-thiocytidine, dihydrouridine, pseudouridine, queuosine, archaeosine, naphthyl and substituted naphthyl groups, any O- and N-alkylated purines and pyrimidines such as N6-methyladenosine, 5-methylcarbonylmethyluridine, uridine 5-oxyacetic acid, pyridine-4-one, pyridine-2-one, phenyl and modified phenyl groups such as aminophenol or 2,4,6-trimethoxy benzene, modified cytosines that act as G-clamp nucleotides, 8-substituted adenines and guanines, 5-substituted uracils and thymines, azapyrimidines, carboxyhydroxyalkyl nucleotides, carboxyalkylaminoalkyl nucleotides, and alkylcarbonylalkylated nucleotides.

[0147] In one embodiment, the modified nucleotides may be on just the sense strand.

[0148] In another embodiment, the modified nucleotides may be on just the antisense strand.

[0149] In some embodiments, the modified nucleotides may be in both the sense and antisense strands.

[0150] In some embodiments, the chemically modified nucleotide does not affect the ability of the antisense strand to pair with the target mRNA sequence, such as the HTT mRNA sequence.

### Molecular Scaffold

[0151] In one embodiment, the siRNA molecules may be encoded in a modulatory polynucleotide which also comprises a molecular scaffold. As used herein a “molecular scaffold” is a framework or starting molecule that forms the sequence or structural basis against which to design or make a subsequent molecule.

[0152] In one embodiment, the molecular scaffold comprises at least one 5′ flanking region. As a non-limiting example, the 5′ flanking region may comprise a 5′ flanking sequence which may be of any length and may be derived in whole or in part from wild type microRNA sequence or be a completely artificial sequence.

[0153] In one embodiment, the molecular scaffold comprises at least one 3′ flanking region. As a non-limiting example, the 3′ flanking region may comprise a 3′ flanking sequence which may be of any length and may be derived in whole or in part from wild type microRNA sequence or be a completely artificial sequence.

[0154] In one embodiment, the molecular scaffold comprises at least one loop motif region. As a non-limiting example, the loop motif region may comprise a sequence which may be of any length.

[0155] In one embodiment, the molecular scaffold comprises a 5′ flanking region, a loop motif region and/or a 3′ flanking region.

[0156] In one embodiment, at least one payload (e.g., siRNA, miRNA or other RNAi agent described herein) may be encoded by a modulatory polynucleotide which may also comprise at least one molecular scaffold. The molecular scaffold may comprise a 5′ flanking sequence which may be of any length and may be derived in whole or in part from wild type microRNA sequence or be completely artificial. The 3′ flanking sequence may mirror the 5′ flanking sequence and/or a 3′ flanking sequence in size and origin. Either flanking sequence may be absent. The 3′ flanking sequence may optionally contain one or more CNNC motifs, where “N” represents any nucleotide.

[0157] Forming the stem of a stem loop structure is a minimum of the modulatory polynucleotide encoding at least one payload sequence. In some embodiments the payload sequence comprises at least one nucleic acid sequence which is in part complementary or will hybridize to a target sequence. In some embodiments the payload is a siRNA molecule or fragment of a siRNA molecule.

[0158] In some embodiments, the 5′ arm of the stem loop structure of the modulatory polynucleotide comprises a nucleic acid sequence encoding a sense sequence. Non-limiting examples of sense sequences, or fragments or variants thereof, which may be encoded by the modulatory polynucleotide are described in Table 2.

[0159] In some embodiments, the 3′ arm of the stem loop of the modulatory polynucleotide comprises a nucleic acid sequence encoding an antisense sequence. The antisense sequence, in some instances, comprises a “G” nucleotide at the 5′ most end. Non-limiting examples of antisense sequences, or fragments or variants thereof, which may be encoded by the modulatory polynucleotide are described in Table 3.

[0160] In other embodiments, the sense sequence may reside on the 3′ arm while the antisense sequence resides on the 5′ arm of the stem of the stem loop structure of the modulatory polynucleotide. Non-limiting examples of sense and antisense sequences which may be encoded by the modulatory polynucleotide are described in Tables 2 and 3.

[0161] In one embodiment, the sense and antisense sequences may be completely complementary across a substantial portion of their length. In other embodiments the sense sequence and antisense sequence may be at least 70, 80, 90, 95 or 99% complementarity across independently at least 50, 60, 70, 80, 85, 90, 95, or 99% of the length of the strands.

[0162] Neither the identity of the sense sequence nor the homology of the antisense sequence need to be 100% complementarity to the target sequence.

[0163] In one embodiment, separating the sense and antisense sequence of the stem loop structure of the modulatory polynucleotide is a loop sequence (also known as a loop motif, linker or linker motif). The loop sequence may be of any length, between 4-30 nucleotides, between 4-20 nucleotides, between 4-15 nucleotides, between 5-15 nucleotides, between 6-12 nucleotides, 6 nucleotides, 7 nucleotides, 8 nucleotides, 9 nucleotides, 10 nucleotides, 11 nucleotides, 12 nucleotides, 13 nucleotides, 14 nucleotides, and/or 15 nucleotides.

[0164] In some embodiments, the loop sequence comprises a nucleic acid sequence encoding at least one UGUG motif. In some embodiments, the nucleic acid sequence encoding the UGUG motif is located at the 5′ terminus of the loop sequence.

[0165] In one embodiment, spacer regions may be present in the modulatory polynucleotide to separate one or more modules (e.g., 5′ flanking region, loop motif region, 3′ flanking region, sense sequence, antisense sequence) from one another. There may be one or more such spacer regions present.

[0166] In one embodiment, a spacer region of between 8-20, i.e., 8, 9, 10, 11, 12, 13, 14, 15, 16, 17, 18, 19, or 20 nucleotides may be present between the sense sequence and a flanking region sequence.

[0167] In one embodiment, the length of the spacer region is 13 nucleotides and is located between the 5′ terminus of the sense sequence and the 3′ terminus of the flanking sequence. In one embodiment, a spacer is of sufficient length to form approximately one helical turn of the sequence.

[0168] In one embodiment, a spacer region of between 8-20, i.e., 8, 9, 10, 11, 12, 13, 14, 15, 16, 17, 18, 19, or 20 nucleotides may be present between the antisense sequence and a flanking sequence.

[0169] In one embodiment, the spacer sequence is between 10-13, i.e., 10, 11, 12 or 13 nucleotides and is located between the 3′ terminus of the antisense sequence and the 5′ terminus of a flanking sequence. In one embodiment, a spacer is of sufficient length to form approximately one helical turn of the sequence.

[0170] In one embodiment, the modulatory polynucleotide comprises in the 5′ to 3′ direction, a 5′ flanking sequence, a 5′ arm, a loop motif, a 3′ arm and a 3′ flanking sequence. As a non-limiting example, the 5′ arm may comprise a sense sequence and the 3′ arm comprises the antisense sequence. In another non-limiting example, the 5′ arm comprises the antisense sequence and the 3′ arm comprises the sense sequence.

[0171] In one embodiment, the 5′ arm, payload (e.g., sense and/or antisense sequence), loop motif and/or 3′ arm sequence may be altered (e.g., substituting 1 or more nucleotides, adding nucleotides and/or deleting nucleotides). The alteration may cause a beneficial change in the function of the construct (e.g., increase knock-down of the target sequence, reduce degradation of the construct, reduce off target effect, increase efficiency of the payload, and reduce degradation of the payload).

[0172] In one embodiment, the molecular scaffold of the modulatory polynucleotides is aligned in order to have the rate of excision of the guide strand be greater than the rate of excision of the passenger strand. The rate of excision of the guide or passenger strand may be, independently, 1%, 2%, 3%, 4%, 5%, 10%, 15%, 20%, 25%, 30%, 35%, 40%, 45%, 50%, 55%, 60%, 65%, 70%, 75%, 80%, 85%, 90%, 95%, 99% or more than 99%. As a non-limiting example, the rate of excision of the guide strand is at least 80%. As another non-limiting example, the rate of excision of the guide strand is at least 90%.

[0173] In one embodiment, the rate of excision of the guide strand is greater than the rate of excision of the passenger strand. In one aspect, the rate of excision of the guide strand may be at least 1%, 2%, 3%, 4%, 5%, 10%, 15%, 20%, 25%, 30%, 35%, 40%, 45%, 50%, 55%, 60%, 65%, 70%, 75%, 80%, 85%, 90%, 95%, 99% or more than 99% greater than the passenger strand.

[0174] In one embodiment, the efficiency of excision of the guide strand is at least 60%, 65%, 70%, 75%, 80%, 85%, 90%, 95%, 99% or more than 99%. As a non-limiting example, the efficiency of the excision of the guide strand is greater than 80%.

[0175] In one embodiment, the efficiency of the excision of the guide strand is greater than the excision of the passenger strand from the molecular scaffold. The excision of the guide strand may be 2, 3, 4, 5, 6, 7, 8, 9, 10 or more than 10 times more efficient than the excision of the passenger strand from the molecular scaffold.

[0176] In one embodiment, the molecular scaffold comprises a dual-function targeting modulatory polynucleotide. As used herein, a “dual-function targeting” modulatory polynucleotide is a polynucleotide where both the guide and passenger strands knock down the same target or the guide and passenger strands knock down different targets.

[0177] In one embodiment, the molecular scaffold of the modulatory polynucleotides described herein may comprise a 5′ flanking region, a loop motif region and a 3′ flanking region. Non-limiting examples of the sequences for the 5′ flanking region, loop motif region (may also be referred to as a linker region) and the 3′ flanking region which may be encoded by the modulatory polynucleotides described herein are shown in Tables 6-8.

TABLE 6
5′ Flanking Regions for Molecular Scaffold

| 5′ | | 5′ |
|---|---|---|
| Flanking | | Flanking |
| Region | | Region |
| Name | 5′ Flanking Region Sequence | SEQ ID |
| 5F3 | GUGCUGGGCGGGGGGCGGCGGGCCCUCCCGC | 252 |
| | AGAACACCAUGCGCUCCACGGAA | |
| 5F1 | GUGCUGGGCGGGGGGCGGCGGGCCCUCCCGC | 250 |
| | AGAACACCAUGCGCUCUUCGGAA | |
| 5F2 | GAAGCAAAGAAGGGGCAGAGGGAGCCCGUG | 251 |
| | AGCUGAGUGGGCCAGGGACUGGGAGAAGGA | |
| | GUGAGGAGGCAGGGCCGGCAUGCCUCUGCU | |
| | GCUGGCCAGA | |
| 5F4 | GGGCCCUCCCGCAGAACACCAUGCGCUCCAC | 253 |
| | GGAA | |
| 5F5 | CUCCCGCAGAACACCAUGCGCUCCACGGAA | 254 |
| 5F6 | GUGCUGGGCGGGGGGCGGCGGGCCCUCCCGC | 255 |
| | AGAACACCAUGCGCUCCACGGAAG | |
| 5F7 | GUGCUGGGCGGGGGGCGGCGGGCCCUCCCGC | 256 |
| | AGAACACCAUGCGCUCCUCGGAA | |

TABLE 7
Loop Motif Regions for Molecular Scaffold

| Loop Motif | Loop Motif | Loop Motif |
|---|---|---|
| Region Name | Region Sequence | Region SEQ ID |
| L5 | GUGGCCACUGAGAAG | 261 |
| L1 | UGUGACCUGG | 257 |
| L2 | UGUGAUUUGG | 258 |
| L3 | GUCUGCACCUGUCACUAG | 259 |
| L4 | GUGACCCAAG | 260 |
| L6 | GUGACCCAAU | 262 |
| L7 | GUGACCCAAC | 263 |
| L8 | GUGGCCACUGAGAAA | 264 |

TABLE 8
3′Flanking Regions for Molecular Scaffold

| 3′ | | 3′ |
|---|---|---|
| Flanking | | Flanking |
| Region | | Region |
| Name | 3′ Flanking Region Sequence | SEQ ID |
| 3F1 | CUGAGGAGCGCCUUGACAGCAGCCAUGGGA | 265 |
| | GGGCCGCCCCCUACCUCAGUGA | |
| 3F2 | CUGUGGAGCGCCUUGACAGCAGCCAUGGGA | 266 |
| | GGGCCGCCCCCUACCUCAGUGA | |
| 3F3 | UGGCCGUGUAGUGCUACCCAGCGCUGGCUGC | 267 |
| | CUCCUCAGCAUUGCAAUUCCUCUCCCAUCUG | |
| | GGCACCAGUCAGCUACCCUGGUGGGAAUCU | |
| | GGGUAGCC | |
| 3F4 | CUGAGGAGCGCCUUGACAGCAGCCAUGGGA | 268 |
| | GGGCC | |
| 3F5 | CUGCGGAGCGCCUUGACAGCAGCCAUGGGA | 269 |
| | GGGCCGCCCCCUACCUCAGUGA | |

[0178] Any of the regions, or fragments thereof described in Tables 6-8, where U is T, may be used as modules in the molecular scaffolds described herein.

[0179] In one embodiment, the molecular scaffold may comprise at least one nucleic acid sequence encoding at least one 5′ flanking region listed in Table 6. As a non-limiting example, the 5′ flanking region may be 5F1, 5F2, 5F3, 5F4, 5F5, 5F6, or 5F7.

[0180] In one embodiment, the molecular scaffold may comprise at least one nucleic acid sequence encoding at least one 5F1 flanking region.

[0181] In one embodiment, the molecular scaffold may comprise at least one nucleic acid sequence encoding at least one 5F2 flanking region.

[0182] In one embodiment, the molecular scaffold may comprise at least one nucleic acid sequence encoding at least one 5F3 flanking region.

[0183] In one embodiment, the molecular scaffold may comprise at least one nucleic acid sequence encoding at least one 5F4 flanking region.

[0184] In one embodiment, the molecular scaffold may comprise at least one nucleic acid sequence encoding at least one 5F5 flanking region.

[0185] In one embodiment, the molecular scaffold may comprise at least one nucleic acid sequence encoding at least one 5F6 flanking region.

[0186] In one embodiment, the molecular scaffold may comprise at least one nucleic acid sequence encoding at least one 5F7 flanking region.

[0187] In one embodiment, the molecular scaffold may comprise at least one nucleic acid sequence encoding at least one loop motif region listed in Table 7. As a non-limiting example, the loop motif region may be L1, L2, L3, L4, L5, L6, L7, or L8.

[0188] In one embodiment, the molecular scaffold may comprise at least one nucleic acid sequence encoding at least one L1 loop motif region.

[0189] In one embodiment, the molecular scaffold may comprise at least one nucleic acid sequence encoding at least one L2 loop motif region.

[0190] In one embodiment, the molecular scaffold may comprise at least one nucleic acid sequence encoding at least one L3 loop motif region.

[0191] In one embodiment, the molecular scaffold may comprise at least one nucleic acid sequence encoding at least one LA loop motif region.

[0192] In one embodiment, the molecular scaffold may comprise at least one nucleic acid sequence encoding at least one L5 loop motif region.

[0193] In one embodiment, the molecular scaffold may comprise at least one nucleic acid sequence encoding at least one L6 loop motif region.

[0194] In one embodiment, the molecular scaffold may comprise at least one nucleic acid sequence encoding at least one L7 loop motif region.

[0195] In one embodiment, the molecular scaffold may comprise at least one nucleic acid sequence encoding at least one L8 loop motif region.

[0196] In one embodiment, the molecular scaffold may comprise at least one nucleic acid sequence encoding at least one 3′ flanking region listed in Table 8. As a non-limiting example, the 3′ flanking region may be 3F1, 3F2, 3F3, 3F4, or 3F5.

[0197] In one embodiment, the molecular scaffold may comprise at least one nucleic acid sequence encoding at least one 3F1 flanking region.

[0198] In one embodiment, the molecular scaffold may comprise at least one nucleic acid sequence encoding at least one 3F2 flanking region.

[0199] In one embodiment, the molecular scaffold may comprise at least one nucleic acid sequence encoding at least one 3F3 flanking region.

[0200] In one embodiment, the molecular scaffold may comprise at least one nucleic acid sequence encoding at least one 3F4 flanking region.

[0201] In one embodiment, the molecular scaffold may comprise at least one nucleic acid sequence encoding at least one 3F5 flanking region.

[0202] In one embodiment, the molecular scaffold may comprise at least one nucleic acid sequence encoding at least one 5′ flanking region and at least one loop motif region as described in Tables 6 and 7. As a non-limiting example, the 5′ flanking region and the loop motif region may be 5F1 and L1, 5F1 and L2, 5F1 and L3, 5F1 and L4, 5F1 and L5, 5F1 and L6, 5F1 and L7, 5F1 and L8, 5F2 and L1, 5F2 and L2, 5F2 and L3, 5F2 and L4, 5F2 and L5, 5F2 and L6, 5F2 and L7, 5F2 and L8, 5F3 and L1, 5F3 and L2, 5F3 and L3, 5F3 and L4, 5F3 and L5, 5F3 and L6, 5F3 and L7, 5F3 and L8, 5F4 and L1, 5F4 and L2, 5F4 and L3, 5F4 and L4, 5F4 and L5, 5F4 and L6, 5F4 and L7, 5F4 and L8, 5F5 and L1, 5F5 and L2, 5F5 and L3, 5F5 and L4, 5F5 and L5, 5F5 and L6, 5F5 and L7, 5F5 and L8, 5F6 and L1, 5F6 and L2, 5F6 and L3, 5F6 and L4, 5F6 and L5, 5F6 and L6, 5F6 and L7, 5F6 and L8, 5F7 and L1, 5F7 and L2, 5F7 and L3, 5F7 and L4, 5F7 and L5, 5F7 and L6, 5F7 and L7, and 5F7 and L8.

[0203] In one embodiment, the molecular scaffold may comprise at least one nucleic acid sequence encoding at least one 5F2 flanking region and at least one nucleic acid sequence encoding at least one L1 loop motif region.

[0204] In one embodiment, the molecular scaffold may comprise at least one nucleic acid sequence encoding at least one 5F1 flanking region and at least one nucleic acid sequence encoding at least one L4 loop motif region.

[0205] In one embodiment, the molecular scaffold may comprise at least one nucleic acid sequence encoding at least one 5F7 flanking region and at least one nucleic acid sequence encoding at least one L8 loop motif region.

[0206] In one embodiment, the molecular scaffold may comprise at least one nucleic acid sequence encoding at least one 5F3 flanking region and at least one nucleic acid sequence encoding at least one L4 loop motif region.

[0207] In one embodiment, the molecular scaffold may comprise at least one nucleic acid sequence encoding at least one 5F3 flanking region and at least one nucleic acid sequence encoding at least one L5 loop motif region.

[0208] In one embodiment, the molecular scaffold may comprise at least one nucleic acid sequence encoding at least one 5F4 flanking region and at least one nucleic acid sequence encoding at least one L4 loop motif region.

[0209] In one embodiment, the molecular scaffold may comprise at least one nucleic acid sequence encoding at least one 5F3 flanking region and at least one nucleic acid sequence encoding at least one L7 loop motif region.

[0210] In one embodiment, the molecular scaffold may comprise at least one nucleic acid sequence encoding at least one 5F5 flanking region and at least one nucleic acid sequence encoding at least one L4 loop motif region.

[0211] In one embodiment, the molecular scaffold may comprise at least one nucleic acid sequence encoding at least one 5F6 flanking region and at least one nucleic acid sequence encoding at least one L4 loop motif region.

[0212] In one embodiment, the molecular scaffold may comprise at least one nucleic acid sequence encoding at least one 5F3 flanking region and at least one nucleic acid sequence encoding at least one L6 loop motif region.

[0213] In one embodiment, the molecular scaffold may comprise at least one nucleic acid sequence encoding at least one 5F7 flanking region and at least one nucleic acid sequence encoding at least one L4 loop motif region.

[0214] In one embodiment, the molecular scaffold may comprise at least one nucleic acid sequence encoding at least one 5F2 flanking region and at least one nucleic acid sequence encoding at least one L2 loop motif region.

[0215] In one embodiment, the molecular scaffold may comprise at least one nucleic acid sequence encoding at least one 5F1 flanking region and at least one nucleic acid sequence encoding at least one L1 loop motif region.

[0216] In one embodiment, the molecular scaffold may comprise at least one nucleic acid sequence encoding at least one 5F1 flanking region and at least one nucleic acid sequence encoding at least one L2 loop motif region.

[0217] In one embodiment, the molecular scaffold may comprise at least one nucleic acid sequence encoding at least one 3′ flanking region and at least one nucleic acid sequence encoding at least one loop motif region as described in Tables 7 and 8. As a non-limiting example, the 3′ flanking region and the loop motif region may be 3F1 and L1, 3F1 and L2, 3F1 and L3, 3F1 and L4, 3F1 and L5, 3F1 and L6, 3F1 and L7, 3F1 and L8, 3F2 and L1, 3F2 and L2, 3F2 and L3, 3F2 and L4, 3F2 and L5, 3F2 and L6, 3F2 and L7, 3F2 and L8, 3F3 and L1, 3F3 and L2, 3F3 and L3, 3F3 and L4, 3F3 and L5, 3F3 and L6, 3F3 and L7, 3F3 and L8, 3F4 and L1, 3F4 and L2, 3F4 and L3, 3F4 and L4, 3F4 and L5, 3F4 and L6, 3F4 and L7, 3F4 and L8, 3F5 and L1, 3F5 and L2, 3F5 and L3, 3F5 and L4, 3F5 and L5, 3F5 and L6, 3F5 and L7, and 3F5 and L8.

[0218] In one embodiment, the molecular scaffold may comprise at least one nucleic acid sequence encoding at least one L1 loop motif region and at least one nucleic acid sequence encoding at least one 3F2 flanking region.

[0219] In one embodiment, the molecular scaffold may comprise at least one nucleic acid sequence encoding at least one LA loop motif region and at least one nucleic acid sequence encoding at least one 3F1 flanking region.

[0220] In one embodiment, the molecular scaffold may comprise at least one nucleic acid sequence encoding at least one L8 loop motif region and at least one nucleic acid sequence encoding at least one 3F5 flanking region.

[0221] In one embodiment, the molecular scaffold may comprise at least one nucleic acid sequence encoding at least one L5 loop motif region and at least one nucleic acid sequence encoding at least one 3F1 flanking region.

[0222] In one embodiment, the molecular scaffold may comprise at least one nucleic acid sequence encoding at least one LA loop motif region and at least one nucleic acid sequence encoding at least one 3F4 flanking region.

[0223] In one embodiment, the molecular scaffold may comprise at least one nucleic acid sequence encoding at least one L7 loop motif region and at least one nucleic acid sequence encoding at least one 3F1 flanking region.

[0224] In one embodiment, the molecular scaffold may comprise at least one nucleic acid sequence encoding at least one L6 loop motif region and at least one nucleic acid sequence encoding at least one 3F1 flanking region.

[0225] In one embodiment, the molecular scaffold may comprise at least one nucleic acid sequence encoding at least one LA loop motif region and at least one nucleic acid sequence encoding at least one 3F5 flanking region.

[0226] In one embodiment, the molecular scaffold may comprise at least one nucleic acid sequence encoding at least one L2 loop motif region and at least one nucleic acid sequence encoding at least one 3F2 flanking region.

[0227] In one embodiment, the molecular scaffold may comprise at least one nucleic acid sequence encoding at least one L1 loop motif region and at least one nucleic acid sequence encoding at least one 3F3 flanking region.

[0228] In one embodiment, the molecular scaffold may comprise at least one nucleic acid sequence encoding at least one L5 loop motif region and at least one nucleic acid sequence encoding at least one 3F4 flanking region.

[0229] In one embodiment, the molecular scaffold may comprise at least one nucleic acid sequence encoding at least one L1 loop motif region and at least one nucleic acid sequence encoding at least one 3F1 flanking region.

[0230] In one embodiment, the molecular scaffold may comprise at least one nucleic acid sequence encoding at least one L2 loop motif region and at least one nucleic acid sequence encoding at least one 3F1 flanking region.

[0231] In one embodiment, the molecular scaffold may comprise at least one nucleic acid sequence encoding at least one 5′ flanking region and at least one nucleic acid sequence encoding at least 3′ flanking region as described in Tables 6 and 8. As a non-limiting example, the flanking regions may be 5F1 and 3F1, 5F1 and 3F2, 5F1 and 3F3, 5F1 and 3F4, 5F1 and 3F5, 5F2 and 3F1, 5F2 and 3F2, 5F2 and 3F3, 5F2 and 3F4, 5F2 and 3F5, 5F3 and 3F1, 5F3 and 3F2, 5F3 and 3F3, 5F3 and 3F4, 5F3 and 3F5, 5F4 and 3F1, 5F4 and 3F2, 5F4 and 3F3, 5F4 and 3F4, 5F4 and 3F5, 5F5 and 3F1, 5F5 and 3F2, 5F5 and 3F3, 5F5 and 3F4, 5F5 and 3F5, 5F6 and 3F1, 5F6 and 3F2, 5F6 and 3F3, 5F6 and 3F4, 5F6 and 3F5, 5F7 and 3F1, 5F7 and 3F2, 5F7 and 3F3, 5F7 and 3F4, and 5F7 and 3F5.

[0232] In one embodiment, the molecular scaffold may comprise at least one nucleic acid sequence encoding at least one 5F2 5′ flanking region and at least one nucleic acid sequence encoding at least one 3F2 3′ flanking region.

[0233] In one embodiment, the molecular scaffold may comprise at least one nucleic acid sequence encoding at least one 5F1 5′ flanking region and at least one nucleic acid sequence encoding at least one 3F1 3′ flanking region.

[0234] In one embodiment, the molecular scaffold may comprise at least one nucleic acid sequence encoding at least one 5F7 5′ flanking region and at least one nucleic acid sequence encoding at least one 3F5 3′ flanking region.

[0235] In one embodiment, the molecular scaffold may comprise at least one nucleic acid sequence encoding at least one 5F3 5′ flanking region and at least one nucleic acid sequence encoding at least one 3F1 3′ flanking region.

[0236] In one embodiment, the molecular scaffold may comprise at least one nucleic acid sequence encoding at least one 5F4 5′ flanking region and at least one nucleic acid sequence encoding at least one 3F4 3′ flanking region.

[0237] In one embodiment, the molecular scaffold may comprise at least one nucleic acid sequence encoding at least one 5F5 5′ flanking region and at least one nucleic acid sequence encoding at least one 3F4 3′ flanking region.

[0238] In one embodiment, the molecular scaffold may comprise at least one nucleic acid sequence encoding at least one 5F6 5′ flanking region and at least one nucleic acid sequence encoding at least one 3F1 3′ flanking region.

[0239] In one embodiment, the molecular scaffold may comprise at least one nucleic acid sequence encoding at least one 5F2 5′ flanking region and at least one nucleic acid sequence encoding at least one 3F3 3′ flanking region.

[0240] In one embodiment, the molecular scaffold may comprise at least one nucleic acid sequence encoding at least one 5F3 5′ flanking region and at least one nucleic acid sequence encoding at least one 3F4 3′ flanking region.

[0241] In one embodiment, the molecular scaffold may comprise at least one nucleic acid sequence encoding at least one 5F1 5′ flanking region and at least one nucleic acid sequence encoding at least one 3F2 3′ flanking region.

[0242] In one embodiment, the molecular scaffold may comprise at least one nucleic acid sequence encoding at least one 5′ flanking region, at least one nucleic acid sequence encoding at least one loop motif region and at least one nucleic acid sequence encoding at least one 3′ flanking region as described in Tables 6-8. As a non-limiting example, the flanking and loop motif regions may be 5F1, L1 and 3F1; 5F1, L1 and 3F2; 5F1, L1 and 3F3; 5F1, L1 and 3F4; 5F1, L1 and 3F5; 5F2, L1 and 3F1; 5F2, L1 and 3F2; 5F2, L1 and 3F3; 5F2, L1 and 3F4; 5F2, L1 and 3F5; 5F3, L1 and 3F3; 5F3, L1 and 3F2; 5F3, L1 and 3F3; 5F3, L1 and 3F4; 5F3, L1 and 3F5; 5F4, L1 and 3F4; 5F4, L1 and 3F2; 5F4, L1 and 3F3; 5F4, L1 and 3F4; 5F4, L1 and 3F5; 5F5, L1 and 3F1; 5F5, L1 and 3F2; 5F5, L1 and 3F3; 5F5, L1 and 3F4; 5F5, L1 and 3F5; 5F6, L1 and 3F1; 5F6, L1 and 3F2; 5F6, L1 and 3F3; 5F6, L1 and 3F4; 5F6, L1 and 3F5; 5F7, L1 and 3F1; 5F7, L1 and 3F2; 5F7, L1 and 3F3; 5F7, L1 and 3F4; 5F7, L1 and 3F5; 5F1, L2 and 3F1; 5F1, L2 and 3F2; 5F1, L2 and 3F3; 5F1, L2 and 3F4; 5F1, L2 and 3F5; 5F2, L2 and 3F1; 5F2, L2 and 3F2; 5F2, L2 and 3F3; 5F2, L2 and 3F4; 5F2, L2 and 3F5; 5F3, L2 and 3F1; 5F3, L2 and 3F2; 5F3, L2 and 3F3; 5F3, L2 and 3F4; 5F3, L2 and 3F5; 5F4, L2 and 3F1; 5F4, L2 and 3F2; 5F4, L2 and 3F3; 5F4, L2 and 3F4; 5F4, L2 and 3F5; 5F5, L2 and 3F1; 5F5, L2 and 3F2; 5F5, L2 and 3F3; 5F5, L2 and 3F4; 5F5, L2 and 3F5; 5F6, L2 and 3F1; 5F6, L2 and 3F2; 5F6, L2 and 3F3; 5F6, L2 and 3F4; 5F6, L2 and 3F5; 5F7, L2 and 3F1; 5F7, L2 and 3F2; 5F7, L2 and 3F3; 5F7, L2 and 3F4; 5F7, L2 and 3F5; 5F1, L3 and 3F1; 5F1, L3 and 3F2; 5F1, L3 and 3F3; 5F1, L3 and 3F4; 5F1, L3 and 3F5; 5F2, L3 and 3F1; 5F2, L3 and 3F2; 5F2, L3 and 3F3; 5F2, L3 and 3F4; 5F2, L3 and 3F5; 5F3, L3 and 3F1; 5F3, L3 and 3F2; 5F3, L3 and 3F3; 5F3, L3 and 3F4; 5F3, L3 and 3F5; 5F4, L3 and 3F1; 5F4, L3 and 3F2; 5F4, L3 and 3F3; 5F4, L3 and 3F4; 5F4, L3 and 3F5; 5F5, L3 and 3F1; 5F5, L3 and 3F2; 5F5, L3 and 3F3; 5F5, L3 and 3F4; 5F5, L3 and 3F5; 5F6, L3 and 3F1; 5F6, L3 and 3F2; 5F6, L3 and 3F3; 5F6, L3 and 3F4; 5F6, L3 and 3F5; 5F7, L3 and 3F1; 5F7, L3 and 3F2; 5F7, L3 and 3F3; 5F7, L3 and 3F4; 5F7, L3 and 3F5; 5F1, L4 and 3F1; 5F1, L4 and 3F2; 5F1, L4 and 3F3; 5F1, L4 and 3F4; 5F1, L4 and 3F5; 5F2, L4 and 3F1; 5F2, L4 and 3F2; 5F2, L4 and 3F3; 5F2, L4 and 3F4; 5F2, L4 and 3F5; 5F3, L4 and 3F1; 5F3, L4 and 3F2; 5F3, L4 and 3F3; 5F3, L4 and 3F4; 5F3, L4 and 3F5; 5F4, LA and 3F1; 5F4, L4 and 3F2; 5F4, L4 and 3F3; 5F4, L4 and 3F4; 5F4, L4 and 3F5; 5F5, L4 and 3F1; 5F5, L4 and 3F2; 5F5, L4 and 3F3; 5F5, L4 and 3F4; 5F5, L4 and 3F5; 5F6, L4 and 3F1; 5F6, L4 and 3F2; 5F6, L4 and 3F3; 5F6, L4 and 3F4; 5F6, L4 and 3F5; 5F7, L4 and 3F1; 5F7, LA and 3F2; 5F7, L4 and 3F3; 5F7, L4 and 3F4; 5F7, L4 and 3F5; 5F1, L5 and 3F1; 5F1, L5 and 3F2; 5F1, L5 and 3F3; 5F1, L5 and 3F4; 5F1, L5 and 3F5; 5F2, L5 and 3F1; 5F2, L5 and 3F2; 5F2, L5 and 3F3; 5F2, L5 and 3F4; 5F2, L5 and 3F5; 5F3, L5 and 3F1; 5F3, L5 and 3F2; 5F3, L5 and 3F3; 5F3, L5 and 3F4; 5F3, L5 and 3F5; 5F4, L5 and 3F1; 5F4, L5 and 3F2; 5F4, L5 and 3F3; 5F4, L5 and 3F4; 5F4, L5 and 3F5; 5F5, L5 and 3F1; 5F5, L5 and 3F2; 5F5, L5 and 3F3; 5F5, L5 and 3F4; 5F5, L5 and 3F5; 5F6, L5 and 3F1; 5F6, L5 and 3F2; 5F6, L5 and 3F3; 5F6, L5 and 3F4; 5F6, L5 and 3F5; 5F7, L5 and 3F1; 5F7, L5 and 3F2; 5F7, L5 and 3F3; 5F7, L5 and 3F4; 5F7, L5 and 3F5; 5F1, L6 and 3F1; 5F1, L6 and 3F2; 5F1, L6 and 3F3; 5F1, L6 and 3F4; 5F1, L6 and 3F5; 5F2, L6 and 3F1; 5F2, L6 and 3F2; 5F2, L6 and 3F3; 5F2, L6 and 3F4; 5F2, L6 and 3F5; 5F3, L6 and 3F1; 5F3, L6 and 3F2; 5F3, L6 and 3F3; 5F3, L6 and 3F4; 5F3, L6 and 3F5; 5F4, L6 and 3F1; 5F4, L6 and 3F2; 5F4, L6 and 3F3; 5F4, L6 and 3F4; 5F4, L6 and 3F5; 5F5, L6 and 3F1; 5F5, L6 and 3F2; 5F5, L6 and 3F3; 5F5, L6 and 3F4; 5F5, L6 and 3F5; 5F6, L6 and 3F1; 5F6, L6 and 3F2; 5F6, L6 and 3F3; 5F6, L6 and 3F4; 5F6, L6 and 3F5; 5F7, L6 and 3F1; 5F7, L6 and 3F2; 5F7, L6 and 3F3; 5F7, L6 and 3F4; 5F7, L6 and 3F5; 5F1, L7 and 3F1; 5F1, L7 and 3F2; 5F1, L7 and 3F3; 5F1, L7 and 3F4; 5F1, L7 and 3F5; 5F2, L7 and 3F1; 5F2, L7 and 3F2; 5F2, L7 and 3F3; 5F2, L7 and 3F4; 5F2, L7 and 3F5; 5F3, L7 and 3F1; 5F3, L7 and 3F2; 5F3, L7 and 3F3; 5F3, L7 and 3F4; 5F3, L7 and 3F5; 5F4, L7 and 3F1; 5F4, L7 and 3F2; 5F4, L7 and 3F3; 5F4, L7 and 3F4; 5F4, L7 and 3F5; 5F5, L7 and 3F1; 5F5, L7 and 3F2; 5F5, L7 and 3F3; 5F5, L7 and 3F4; 5F5, L7 and 3F5; 5F6, L7 and 3F1; 5F6, L7 and 3F2; 5F6, L7 and 3F3; 5F6, L7 and 3F4; 5F6, L7 and 3F5; 5F7, L7 and 3F1; 5F7, L7 and 3F2; 5F7, L7 and 3F3; 5F7, L7 and 3F4; 5F7, L7 and 3F5; 5F1, L8 and 3F1; 5F1, L8 and 3F2; 5F1, L8 and 3F3; 5F1, L8 and 3F4; 5F1, L8 and 3F5; 5F2, L8 and 3F1; 5F2, L8 and 3F2; 5F2, L8 and 3F3; 5F2, L8 and 3F4; 5F2, L8 and 3F5; 5F3, L8 and 3F1; 5F3, L8 and 3F2; 5F3, L8 and 3F3; 5F3, L8 and 3F4; 5F3, L8 and 3F5; 5F4, L8 and 3F1; 5F4, L8 and 3F2; 5F4, L8 and 3F3; 5F4, L8 and 3F4; 5F4, L8 and 3F5; 5F5, L8 and 3F1; 5F5, L8 and 3F2; 5F5, L8 and 3F3; 5F5, L8 and 3F4; 5F5, L8 and 3F5; 5F6, L8 and 3F1; 5F6, L8 and 3F2; 5F6, L8 and 3F3; 5F6, L8 and 3F4; 5F6, L8 and 3F5; 5F7, L8 and 3F1; 5F7, L8 and 3F2; 5F7, L8 and 3F3; 5F7, L8 and 3F4; and 5F7, L8 and 3F5.

[0243] In one embodiment, the molecular scaffold may comprise at least one nucleic acid sequence encoding at least one 5F2 5′ flanking region, at least one nucleic acid sequence encoding at least one L1 loop motif region, and at least one nucleic acid sequence encoding at least one 3F2 3′ flanking region.

[0244] In one embodiment, the molecular scaffold may comprise at least one nucleic acid sequence encoding at least one 5F1 5′ flanking region, at least one nucleic acid sequence encoding at least one L4 loop motif region, and at least one nucleic acid sequence encoding at least one 3F1 3′ flanking region.

[0245] In one embodiment, the molecular scaffold may comprise at least one nucleic acid sequence encoding at least one 5F7 5′ flanking region, at least one nucleic acid sequence encoding at least one L8 loop motif region, and at least one nucleic acid sequence encoding at least one 3F5 3′ flanking region.

[0246] In one embodiment, the molecular scaffold may comprise at least one nucleic acid sequence encoding at least one 5F3 5′ flanking region, at least one nucleic acid sequence encoding at least one L4 loop motif region, and at least one nucleic acid sequence encoding at least one 3F1 3′ flanking region.

[0247] In one embodiment, the molecular scaffold may comprise at least one nucleic acid sequence encoding at least one 5F3 5′ flanking region, at least one nucleic acid sequence encoding at least one L5 loop motif region, and at least one nucleic acid sequence encoding at least one 3F1 3′ flanking region.

[0248] In one embodiment, the molecular scaffold may comprise at least one nucleic acid sequence encoding at least one 5F4 5′ flanking region, at least one nucleic acid sequence encoding at least one L4 loop motif region, and at least one nucleic acid sequence encoding at least one 3F4 3′ flanking region.

[0249] In one embodiment, the molecular scaffold may comprise at least one nucleic acid sequence encoding at least one 5F3 5′ flanking region, at least one nucleic acid sequence encoding at least one L7 loop motif region, and at least one nucleic acid sequence encoding at least one 3F1 3′ flanking region.

[0250] In one embodiment, the molecular scaffold may comprise at least one nucleic acid sequence encoding at least one 5F5 5′ flanking region, at least one nucleic acid sequence encoding at least one L4 loop motif region, and at least one nucleic acid sequence encoding at least one 3F4 3′ flanking region.

[0251] In one embodiment, the molecular scaffold may comprise at least one nucleic acid sequence encoding at least one 5F6 5′ flanking region, at least one nucleic acid sequence encoding at least one L4 loop motif region, and at least one nucleic acid sequence encoding at least one 3F1 3′ flanking region.

[0252] In one embodiment, the molecular scaffold may comprise at least one nucleic acid sequence encoding at least one 5F3 5′ flanking region, at least one nucleic acid sequence encoding at least one L6 loop motif region, and at least one nucleic acid sequence encoding at least one 3F1 3′ flanking region.

[0253] In one embodiment, the molecular scaffold may comprise at least one nucleic acid sequence encoding at least one 5F7 5′ flanking region, at least one nucleic acid sequence encoding at least one L4 loop motif region, and at least one nucleic acid sequence encoding at least one 3F5 3′ flanking region.

[0254] In one embodiment, the molecular scaffold may comprise at least one nucleic acid sequence encoding at least one 5F2 5′ flanking region, at least one nucleic acid sequence encoding at least one L2 loop motif region, and at least one nucleic acid sequence encoding at least one 3F2 3′ flanking region.

[0255] In one embodiment, the molecular scaffold may comprise at least one nucleic acid sequence encoding at least one 5F2 5′ flanking region, at least one nucleic acid sequence encoding at least one L1 loop motif region, and at least one nucleic acid sequence encoding at least one 3F3 3′ flanking region.

[0256] In one embodiment, the molecular scaffold may comprise at least one nucleic acid sequence encoding at least one 5F3 5′ flanking region, at least one nucleic acid sequence encoding at least one L5 loop motif region, and at least one nucleic acid sequence encoding at least one 3F4 3′ flanking region.

[0257] In one embodiment, the molecular scaffold may comprise at least one nucleic acid sequence encoding at least one 5F1 5′ flanking region, at least one nucleic acid sequence encoding at least one L1 loop motif region, and at least one nucleic acid sequence encoding at least one 3F1 3′ flanking region.

[0258] In one embodiment, the molecular scaffold may comprise at least one nucleic acid sequence encoding at least one 5F1 5′ flanking region, at least one nucleic acid sequence encoding at least one L2 loop motif region, and at least one nucleic acid sequence encoding at least one 3F1 3′ flanking region.

[0259] In one embodiment, the molecular scaffold may comprise at least one nucleic acid sequence encoding at least one 5F1 5′ flanking region, at least one nucleic acid sequence encoding at least one L1 loop motif region, and at least one nucleic acid sequence encoding at least one 3F2 3′ flanking region.

[0260] In one embodiment, the molecular scaffold may comprise at least one nucleic acid sequence encoding at least one 5F2 5′ flanking region, at least one nucleic acid sequence encoding at least one L3 loop motif region, and at least one nucleic acid sequence encoding at least one 3F3 3′ flanking region.

[0261] In one embodiment, the modulatory polynucleotide may comprise nucleic acid sequences encoding 5′ and 3′ flanking regions, loop motif region, sense sequence and antisense sequence as described in Tables 9 and 10. In Tables 9 and 10, the passenger and guide strands are described as well as the 5′ and 3′ Flanking Regions and the Loop region (also referred to as the linker region). In Tables 9 and 10, the “miR” component of the name of the sequence does not necessarily correspond to the sequence numbering of miRNA genes (e.g., VOYHTmiR-102 is the name of the sequence and does not necessarily mean that miR-102 is part of the sequence).

TABLE 9
Pri-miRNA Cassettes Containing Passenger and Guide Sequences (5′-3′)

| | 5′ Flanking | | | Loop | | |
|---|---|---|---|---|---|---|
| | to 3′ Flanking | 5′ Flanking | Passenger | (Linker) | Guide | 3′ Flanking |
| Name | SEQ ID NO | SEQ ID NO | SEQ ID NO | SEQ ID NO | SEQ ID NO | SEQ ID NO |
| VOYHTmiR-102.214 | 270 | 250 | 120 | 257 | 11 | 265 |
| VOYHTmiR-104.214 | 271 | 250 | 127 | 257 | 11 | 265 |
| VOYHTmiR-109.214 | 272 | 250 | 135 | 258 | 11 | 265 |
| VOYHTmiR-114.214 | 273 | 250 | 145 | 257 | 11 | 266 |
| VOYHTmiR-116.214 | 274 | 250 | 135 | 257 | 11 | 266 |
| VOYHTmiR-127.214 | 275 | 251 | 135 | 259 | 5 | 267 |
| VOYHTmiR-102.218 | 276 | 250 | 121 | 257 | 13 | 265 |
| VOYHTmiR-104.218 | 277 | 250 | 128 | 257 | 13 | 265 |
| VOYHTmiR-109.218 | 278 | 250 | 137 | 258 | 13 | 265 |
| VOYHTmiR-114.218 | 279 | 250 | 146 | 257 | 13 | 266 |
| VOYHTmiR-116.218 | 280 | 250 | 137 | 257 | 13 | 266 |
| VOYHTmiR-127.218 | 281 | 251 | 137 | 259 | 13 | 267 |
| VOYHTmiR-102.219.o | 282 | 250 | 103 | 257 | 3 | 265 |
| VOYHTmiR-104.219.o | 283 | 250 | 106 | 257 | 3 | 265 |
| VOYHTmiR-109.219.o | 284 | 250 | 103 | 258 | 3 | 265 |
| VOYHTmiR-114.219 | 285 | 250 | 109 | 257 | 3 | 266 |
| VOYHTmiR-116.219.o | 286 | 250 | 112 | 257 | 3 | 266 |
| VOYHTmiR-127.219.o | 287 | 251 | 103 | 259 | 3 | 267 |
| VOYHTmiR-102.219.n | 288 | 250 | 116 | 257 | 3 | 265 |
| VOYHTmiR-104.219.n | 289 | 250 | 117 | 257 | 3 | 265 |
| VOYHTmiR-109.219.n | 290 | 250 | 116 | 258 | 3 | 265 |
| VOYHTmiR-116.219.n | 291 | 250 | 118 | 257 | 3 | 266 |
| VOYHTmiR-127.219.n | 292 | 251 | 116 | 259 | 3 | 267 |
| VOYHTmiR-102.257 | 293 | 250 | 122 | 257 | 15 | 265 |
| VOYHTmiR-104.257 | 294 | 250 | 129 | 257 | 15 | 265 |
| VOYHTmiR-109.257 | 295 | 250 | 138 | 258 | 15 | 265 |
| VOYHTmiR-114.257 | 296 | 250 | 147 | 257 | 15 | 266 |
| VOYHTmiR-116.257 | 297 | 250 | 138 | 257 | 15 | 266 |
| VOYHTmiR-127.257 | 298 | 251 | 138 | 259 | 15 | 267 |
| VOYHTmiR-102.894 | 299 | 250 | 104 | 257 | 5 | 265 |
| VOYHTmiR-104.894 | 300 | 250 | 107 | 257 | 5 | 265 |
| VOYHTmiR-109.894 | 301 | 250 | 104 | 258 | 5 | 265 |
| VOYHTmiR-114.894 | 302 | 250 | 110 | 257 | 5 | 266 |
| VOYHTmiR-116.894 | 303 | 250 | 113 | 257 | 5 | 266 |
| VOYHTmiR-127.894 | 304 | 251 | 104 | 259 | 5 | 267 |
| VOYHTmiR-102.907 | 305 | 250 | 125 | 257 | 21 | 265 |
| VOYHTmiR-104.907 | 306 | 250 | 132 | 257 | 21 | 265 |
| VOYHTmiR-109.907 | 307 | 250 | 142 | 258 | 21 | 265 |
| VOYHTmiR-114.907 | 308 | 250 | 150 | 257 | 21 | 266 |
| VOYHTmiR-116.907 | 309 | 250 | 142 | 257 | 21 | 266 |
| VOYHTmiR-127.907 | 310 | 251 | 142 | 259 | 21 | 267 |
| VOYHTmiR-102.372 | 311 | 250 | 123 | 257 | 17 | 265 |
| VOYHTmiR-104.372 | 312 | 250 | 130 | 257 | 17 | 265 |
| VOYHTmiR-109.372 | 313 | 250 | 139 | 258 | 17 | 265 |
| VOYHTmiR-114.372 | 314 | 250 | 148 | 257 | 17 | 266 |
| VOYHTmiR-116.372 | 315 | 250 | 139 | 257 | 17 | 266 |
| VOYHTmiR-127.372 | 316 | 251 | 139 | 259 | 17 | 267 |
| VOYHTmiR-102.425 | 317 | 250 | 124 | 257 | 19 | 265 |
| VOYHTmiR-104.425 | 318 | 250 | 131 | 257 | 19 | 265 |
| VOYHTmiR-109.425 | 319 | 250 | 140 | 258 | 19 | 265 |
| VOYHTmiR-114.425 | 320 | 250 | 149 | 257 | 19 | 266 |
| VOYHTmiR-116.425 | 321 | 250 | 140 | 257 | 19 | 266 |
| VOYHTmiR-127.425 | 322 | 251 | 140 | 259 | 19 | 267 |
| VOYHTmiR-102.032 | 323 | 250 | 152 | 257 | 25 | 265 |
| VOYHTmiR-104.032 | 324 | 250 | 154 | 257 | 25 | 265 |
| VOYHTmiR-109.032 | 325 | 250 | 157 | 258 | 25 | 265 |
| VOYHTmiR-114.032 | 326 | 250 | 160 | 257 | 25 | 266 |
| VOYHTmiR-116.032 | 327 | 250 | 157 | 257 | 25 | 266 |
| VOYHTmiR-127.032 | 328 | 251 | 157 | 259 | 25 | 267 |
| VOYHTmiR-102.020 | 329 | 250 | 151 | 257 | 23 | 265 |
| VOYHTmiR-104.020 | 330 | 250 | 153 | 257 | 23 | 265 |
| VOYHTmiR-109.020 | 331 | 250 | 155 | 258 | 23 | 265 |
| VOYHTmiR-114.020 | 332 | 250 | 159 | 257 | 23 | 266 |
| VOYHTmiR-116.020 | 333 | 250 | 155 | 257 | 23 | 266 |
| VOYHTmiR-127.020 | 334 | 251 | 155 | 259 | 23 | 267 |
| VOYHTmiR-102.016 | 335 | 250 | 119 | 257 | 9 | 265 |
| VOYHTmiR-104.016 | 336 | 250 | 126 | 257 | 9 | 265 |
| VOYHTmiR-109.016 | 337 | 250 | 133 | 258 | 9 | 265 |
| VOYHTmiR-114.016 | 338 | 250 | 144 | 257 | 9 | 266 |
| VOYHTmiR-116.016 | 339 | 250 | 133 | 257 | 9 | 266 |
| VOYHTmiR-127.016 | 340 | 251 | 133 | 259 | 9 | 267 |
| VOYHTmiR-102.579 | 341 | 250 | 105 | 257 | 7 | 265 |
| VOYHTmiR-104.579 | 342 | 250 | 108 | 257 | 7 | 265 |
| VOYHTmiR-109.579 | 343 | 250 | 105 | 258 | 7 | 265 |
| VOYHTmiR-114.579 | 344 | 250 | 111 | 257 | 7 | 266 |
| VOYHTmiR-116.579 | 345 | 250 | 114 | 257 | 7 | 266 |
| VOYHTmiR-127.579 | 346 | 251 | 105 | 259 | 7 | 267 |
| VOYHTmiR-104.579.1 | 347 | 250 | 168 | 260 | 7 | 265 |
| VOYHTmiR-104.579.2 | 348 | 252 | 168 | 260 | 7 | 265 |
| VOYHTmiR-104.579.3 | 349 | 252 | 168 | 261 | 7 | 265 |
| VOYHTmiR-104.579.4 | 350 | 253 | 168 | 260 | 7 | 268 |
| VOYHTmiR-104.579.6 | 351 | 254 | 168 | 260 | 7 | 268 |
| VOYHTmiR-104.579.7 | 352 | 255 | 168 | 260 | 29 | 265 |
| VOYHTmiR-104.579.8 | 353 | 252 | 169 | 262 | 7 | 265 |
| VOYHTmiR-104.579.9 | 354 | 256 | 168 | 260 | 7 | 269 |
| VOYHTmiR-102.020 | 355 | 250 | 151 | 257 | 23 | 265 |
| VOYHTmiR-102.032 | 356 | 250 | 152 | 257 | 25 | 265 |
| VOYHTmiR-104.020 | 357 | 250 | 153 | 257 | 23 | 265 |
| VOYHTmiR-104.032 | 358 | 250 | 154 | 257 | 25 | 265 |
| VOYHTmiR-109.020 | 359 | 250 | 155 | 258 | 23 | 265 |
| VOYHTmiR-109.032 | 360 | 250 | 157 | 258 | 25 | 265 |
| VOYHTmiR-114.020 | 361 | 250 | 159 | 257 | 23 | 266 |
| VOYHTmiR-114.032 | 362 | 250 | 160 | 257 | 25 | 266 |
| VOYHTmiR-116.020 | 363 | 250 | 155 | 257 | 23 | 266 |
| VOYHTmiR-116.032 | 364 | 250 | 157 | 257 | 25 | 266 |
| VOYHTmiR-127.020 | 365 | 251 | 155 | 259 | 23 | 267 |
| VOYHTmiR-127.032 | 366 | 251 | 157 | 259 | 25 | 267 |

TABLE 10
Pri-miRNA Cassettes Containing Guide and Passenger Sequences (5′-3′)

| | 5′ Flanking | | | | | |
|---|---|---|---|---|---|---|
| | to 3′ Flanking | 5′ Flanking | Guide | Loop | Passenger | 3′ Flanking |
| Name | SEQ ID NO | SEQ ID NO | SEQ ID NO | SEQ ID NO | SEQ ID NO | SEQ ID NO |
| VOYHTmiR-104.579.5 | 367 | 252 | 170 | 263 | 30 | 265 |
| VOYHTmiR-104.579.10 | 368 | 256 | 171 | 264 | 7 | 279 |

[0262] In one embodiment, the molecular scaffold may comprise one or more linkers known in the art. The linkers may separate regions or one molecular scaffold from another. As a non-limiting example, the molecular scaffold may be polycistronic.

[0263] In one embodiment, the modulatory polynucleotide is designed using at least one of the following properties: loop variant, seed mismatch/bulge/wobble variant, stem mismatch, loop variant and vassal stem mismatch variant, seed mismatch and basal stem mismatch variant, stem mismatch and basal stem mismatch variant, seed wobble and basal stem wobble variant, or a stem sequence variant.

[0264] In one embodiment, the molecular scaffold may be a natural pri-miRNA scaffold. As a non-limiting example, the molecular scaffold may be a scaffold derived from the human miR155 scaffold.

[0265] In one embodiment, the molecular scaffold may be located downstream of a CMV promoter, fragment or variant thereof.

[0266] In one embodiment, the molecular scaffold may be located downstream of a CBA promoter, fragment or variant thereof.

[0267] In one embodiment, the molecular scaffold may be a natural pri-miRNA scaffold located downstream of a CMV promoter. As a non-limiting example, the natural pri-miRNA scaffold is derived from the human miR155 scaffold.

[0268] In one embodiment, the molecular scaffold may be a natural pri-miRNA scaffold located downstream of a CBA promoter.

[0269] In one embodiment, the selection of a molecular scaffold and modulatory polynucleotide is determined by a method of comparing modulatory polynucleotides in pri-miRNA (see e.g., the method described by Miniarikova et al. Design, Characterization, and Lead Selection of Therapeutic miRNAs Targeting Huntingtin for Development of Gene Therapy for Huntington's Disease. Molecular Therapy-Nucleic Acids (2016) 5, e297 and International Publication No. WO2016102664; the contents of each of which are herein incorporated by reference in their entireties). The modulatory polynucleotide may, but it not limited to, targeting exon 1, CAG repeats, SNP rs362331 in exon 50 and/or SNP rs362307 in exon 67. To evaluate the activities of the modulatory polynucleotides, the molecular scaffold used which may be used is a human pri-miRNA scaffold (e.g., miR 155 scaffold) and the promoter may be CMV. The activity may be determined in vitro using HEK293T cells and a reporter (e.g., Luciferase). For exon 1 targeting, the modulatory polynucleotide is determined to be efficient at HTT knockdown if the knockdown is 80% or greater. For CAG targeting, the modulatory polynucleotide is determined to be efficient at HTT knockdown if the knockdown is at least 60%. For SNP targeting, the modulatory polynucleotide is determined to be efficient at HTT knockdown if the knockdown is at least 60%. For allele selectivity for CAG repeats or SNP targeting the modulatory polynucleotides may comprise at least 1 substitution in order to improve allele selectivity. As a non-limiting example, substitution may be a G or C replaced with a T or corresponding U and A or T/U replaced by a C.

[0270] In order to evaluate the optimal molecular scaffold for the modulatory polynucleotide, the modulatory polynucleotide is used in pri-miRNA scaffolds with a CAG promoter. The constructs are co-transfected with a reporter (e.g., luciferase reporter) at 50 ng. Constructs with greater than 80% knockdown at 50 ng co-transfection are considered efficient. In one aspect, the constructs with strong guide-strand activity are preferred. In one aspect, the constructs with strong passenger-strand activity are preferred. The molecular scaffolds can be processed in HEK293T cells by NGS to determine guide-passenger ratios, and processing variability.

[0271] To evaluate the molecular scaffolds and modulatory polynucleotides in vivo the molecular scaffolds comprising the modulatory polynucleotides are packaged in AAV (e.g., the serotype may be AAV5 (see e.g., the method and constructs described in WO2015060722, the contents of which are herein incorporated by reference in their entirety)) and administered to an in vivo model (e.g., Hu128/21 HD mouse) and the guide-passenger ratios, 5′ and 3′ end processing, reversal of guide and passenger strands, and knockdown can be determined in different areas of the model.

[0272] In one embodiment, the selection of a molecular scaffold and modulatory polynucleotide is determined by a method of comparing modulatory polynucleotides in natural pri-miRNA and synthetic pri-miRNA. The modulatory polynucleotide may, but it not limited to, targeting an exon other than exon 1. To evaluate the activities of the modulatory polynucleotides, the molecular scaffold is used with a CBA promoter. In one aspect, the activity may be determined in vitro using HEK293T cells, HeLa cell and a reporter (e.g., Luciferase) and knockdown efficient modulatory polynucleotides showed HTT knockdown of at least 80% in the cell tested. Additionally, the modulatory polynucleotides which are considered most efficient showed low to no significant passenger strand (p-strand) activity. In another aspect, the endogenous HTT knockdown efficacy is evaluated by transfection in vitro using HEK293T cells, HeLa cell and a reporter. Efficient modulatory polynucleotides show greater than 50% endogenous HTT knockdown. In yet another aspect, the endogenous HTT knockdown efficacy is evaluated in different cell types (e.g., HEK293, HeLa, primary astrocytes, U251 astrocytes, SH-SY5Y neuron cells and fibroblasts from HD patients) by infection (e.g., AAV2). Efficient modulatory polynucleotides show greater than 60% endogenous HTT knockdown.

[0273] To evaluate the molecular scaffolds and modulatory polynucleotides in vivo the molecular scaffolds comprising the modulatory polynucleotides are packaged in AAV and administered to an in vivo model (e.g., YAC128 HD mouse) and the guide-passenger ratios, 5′ and 3′ end processing, ratio of guide to passenger strands, and knockdown can be determined in different areas of the model (e.g., tissue regions). The molecular scaffolds can be processed from in vivo samples by NGS to determine guide-passenger ratios, and processing variability.

### Vectors

[0274] In some embodiments, the siRNA molecules described herein can be encoded by vectors such as plasmids or viral vectors. In one embodiment, the siRNA molecules are encoded by viral vectors. Viral vectors may be, but are not limited to, Herpesvirus (HSV) vectors, retroviral vectors, adenoviral vectors, adeno-associated viral vectors, lentiviral vectors, and the like. In some specific embodiments, the viral vectors are AAV vectors.

### Retroviral Vectors

[0275] In some embodiments, the siRNA duplex targeting HTT gene may be encoded by a retroviral vector (Sec, e.g., U.S. Pat. Nos. 5,399,346; 5,124,263; 4,650,764 and 4,980,289; the content of each of which are incorporated herein by reference in their entirety).

### Adenoviral Vectors

[0276] Adenoviruses are eukaryotic DNA viruses that can be modified to efficiently deliver a nucleic acid to a variety of cell types in vivo, and have been used extensively in gene therapy protocols, including for targeting genes to neural cells. Various replication defective adenovirus and minimum adenovirus vectors have been described for nucleic acid therapeutics (See, e.g., PCT Patent Publication Nos. WO199426914, WO 199502697, WO199428152, WO199412649, WO199502697 and WO199622378; the content of each of which is incorporated by reference in their entirety). Such adenoviral vectors may also be used to deliver siRNA molecules of the present invention to cells.

### Adeno-Associated Viral (AAV) Vectors

[0277] An adeno-associated virus (AAV) is a dependent parvovirus (like other parvoviruses) which is a single stranded non-enveloped DNA virus having a genome of about 5000 nucleotides in length and which contains two open reading frames encoding the proteins responsible for replication (Rep) and the structural protein of the capsid (Cap). The open reading frames are flanked by two Inverted Terminal Repeat (ITR) sequences, which serve as the origin of replication of the viral genome. Furthermore, the AAV genome contains a packaging sequence, allowing packaging of the viral genome into an AAV capsid. The AAV vector requires a co-helper (e.g., adenovirus) to undergo productive infection in infected cells. In the absence of such helper functions, the AAV virions essentially enter host cells but do not integrate into the cells' genome.

[0278] AAV vectors have been investigated for siRNA delivery because of several unique features. Non-limiting examples of the features include (i) the ability to infect both dividing and non-dividing cells; (ii) a broad host range for infectivity, including human cells; (iii) wild-type AAV has not been associated with any disease and has not been shown to replicate in infected cells; (iv) the lack of cell-mediated immune response against the vector and (v) the non-integrative nature in a host chromosome thereby reducing potential for long-term genetic alterations. Moreover, infection with AAV vectors has minimal influence on changing the pattern of cellular gene expression (Stilwell and Samulski et al., Biotechniques, 2003, 34, 148).

[0279] Typically, AAV vectors for siRNA delivery may be recombinant viral vectors which are replication defective as they lack sequences encoding functional Rep and Cap proteins within the viral genome. In some cases, the defective AAV vectors may lack most or all coding sequences and essentially only contains one or two AAV ITR sequences and a packaging sequence.

[0280] In one embodiment, the AAV vectors comprising a nucleic acid sequence encoding the siRNA molecules of the present invention may be introduced into mammalian cells.

[0281] AAV vectors may be modified to enhance the efficiency of delivery. Such modified AAV vectors comprising the nucleic acid sequence encoding the siRNA molecules of the present invention can be packaged efficiently and can be used to successfully infect the target cells at high frequency and with minimal toxicity.

[0282] In some embodiments, the AAV vector comprising a nucleic acid sequence encoding the siRNA molecules of the present invention may be a human serotype AAV vector. Such human AAV vector may be derived from any known serotype, e.g., from any one of serotypes AAV1-AAV11. As non-limiting examples, AAV vectors may be vectors comprising an AAV1-derived genome in an AAV1-derived capsid; vectors comprising an AAV2-derived genome in an AAV2-derived capsid; vectors comprising an AAV4-derived genome in an AAV4 derived capsid; vectors comprising an AAV6-derived genome in an AAV6 derived capsid or vectors comprising an AAV9-derived genome in an AAV9 derived capsid.

[0283] In other embodiments, the AAV vector comprising a nucleic acid sequence for encoding siRNA molecules of the present invention may be a pseudotyped hybrid or chimeric AAV vector which contains sequences and/or components originating from at least two different AAV serotypes. Pseudotyped AAV vectors may be vectors comprising an AAV genome derived from one AAV serotype and a capsid protein derived at least in part from a different AAV serotype. As non-limiting examples, such pseudotyped AAV vectors may be vectors comprising an AAV2-derived genome in an AAV1-derived capsid; or vectors comprising an AAV2-derived genome in an AAV6-derived capsid; or vectors comprising an AAV2-derived genome in an AAV4-derived capsid; or an AAV2-derived genome in an AAV9-derived capsid. In like fashion, the present invention contemplates any hybrid or chimeric AAV vector.

[0284] In other embodiments, AAV vectors comprising a nucleic acid sequence encoding the siRNA molecules of the present invention may be used to deliver siRNA molecules to the central nervous system (e.g., U.S. Pat. No. 6,180,613; the contents of which is herein incorporated by reference in its entirety).

[0285] In some aspects, the AAV vectors comprising a nucleic acid sequence encoding the siRNA molecules of the present invention may further comprise a modified capsid including peptides from non-viral origin. In other aspects, the AAV vector may contain a CNS specific chimeric capsid to facilitate the delivery of encoded siRNA duplexes into the brain and the spinal cord. For example, an alignment of cap nucleotide sequences from AAV variants exhibiting CNS tropism may be constructed to identify variable region (VR) sequence and structure.

[0286] In one embodiment, the AAV vector comprising a nucleic acid sequence encoding the siRNA molecules of the present invention may encode siRNA molecules which are polycistronic molecules. The siRNA molecules may additionally comprise one or more linkers between regions of the siRNA molecules.

### Self-Complementary and Single Strand Vectors

[0287] In one embodiment, the AAV vector used in the present invention is a single strand vector (ssAAV).

[0288] In another embodiment, the AAV vectors may be self-complementary AAV vectors (scAAVs). scAAV vectors contain both DNA strands which anneal together to form double stranded DNA. By skipping second strand synthesis, scAAVs allow for rapid expression in the cell.

[0289] In one embodiment, the AAV vector used in the present invention is a scAAV.

[0290] Methods for producing and/or modifying AAV vectors are disclosed in the art such as pseudotyped AAV vectors (International Patent Publication Nos. WO200028004; WO200123001; WO2004112727; WO 2005005610 and WO 2005072364, the content of each of which are incorporated herein by reference in their entirety).

### AAV Serotypes

[0291] AAV particles of the present invention may comprise or be derived from any natural or recombinant AAV serotype. According to the present invention, the AAV particles may utilize or be based on a serotype selected from any of the following AAV1, AAV2, AAV2G9, AAV3, AAV3a, AAV3b, AAV3-3, AAV4, AAV4-4, AAV5, AAV6, AAV6.1, AAV6.2, AAV6.1.2, AAV7, AAV7.2, AAV8, AAV9, AAV9.11, AAV9.13, AAV9.16, AAV9.24, AAV9.45, AAV9.47, AAV9.61, AAV9.68, AAV9.84, AAV9.9, AAV10, AAV11, AAV12, AAV16.3, AAV24.1, AAV27.3, AAV42.12, AAV42-1b, AAV42-2, AAV42-3a, AAV42-3b, AAV42-4, AAV42-5a, AAV42-5b, AAV42-6b, AAV42-8, AAV42-10, AAV42-11, AAV42-12, AAV42-13, AAV42-15, AAV42-aa, AAV43-1, AAV43-12, AAV43-20, AAV43-21, AAV43-23, AAV43-25, AAV43-5, AAV44.1, AAV44.2, AAV44.5, AAV223.1, AAV223.2, AAV223.4, AAV223.5, AAV223.6, AAV223.7, AAV1-7/rh.48, AAV1-8/rh.49, AAV2-15/rh.62, AAV2-3/rh.61, AAV2-4/rh.50, AAV2-5/rh.51, AAV3.1/hu.6, AAV3.1/hu.9, AAV3-9/rh.52, AAV3-11/rh.53, AAV4-8/r11.64, AAV4-9/rh.54, AAV4-19/rh.55, AAV5-3/rh.57, AAV5-22/rh.58, AAV7.3/hu.7, AAV16.8/hu.10, AAV16.12/hu.11, AAV29.3/bb.1, AAV29.5/bb.2, AAV106.1/hu.37, AAV114.3/hu.40, AAV127.2/hu.41, AAV127.5/hu.42, AAV128.3/hu.44, AAV130.4/hu.48, AAV145.1/hu.53, AAV145.5/hu.54, AAV145.6/hu.55, AAV161.10/hu.60, AAV161.6/hu.61, AAV33.12/hu.17, AAV33.4/hu.15, AAV33.8/hu.16, AAV52/hu. 19, AAV52.1/hu.20, AAV58.2/hu.25, AAVA3.3, AAVA3.4, AAVA3.5, AAVA3.7, AAVC1, AAVC2, AAVC5, AAV-DJ, AAV-DJ8, AAVF3, AAVF5, AAVH2, AAVrh.72, AAVhu.8, AAVrh.68, AAVrh.70, AAVpi.1, AAVpi.3, AAVpi.2, AAVrh.60, AAVrh.44, AAVrh.65, AAVrh.55, AAVrh.47, AAVrh.69, AAVrh.45, AAVrh.59, AAVhu. 12, AAVH6, AAVLK03, AAVH-1/hu.1, AAVH-5/hu.3, AAVLG-10/rh.40, AAVLG-4/rh.38, AAVLG-9/hu.39, AAVN721-8/rh.43, AAVCh.5, AAVCh.5R1, AAVcy.2, AAVcy.3, AAVcy.4, AAVcy.5, AAVCy.5R1, AAVCy.5R2, AAVCy.5R3, AAVCy.5R4, AAVcy.6, AAVhu. 1, AAVhu.2, AAVhu.3, AAVhu.4, AAVhu.5, AAVhu.6, AAVhu.7, AAVhu.9, AAVhu. 10, AAVhu.11, AAVhu. 13, AAVhu.15, AAVhu.16, AAVhu. 17, AAVhu. 18, AAVhu.20, AAVhu.21, AAVhu.22, AAVhu.23.2, AAVhu.24, AAVhu.25, AAVhu.27, AAVhu.28, AAVhu.29, AAVhu.29R, AAVhu.31, AAVhu.32, AAVhu.34, AAVhu.35, AAVhu.37, AAVhu.39, AAVhu.40, AAVhu.41, AAVhu.42, AAVhu.43, AAVhu.44, AAVhu.44R1, AAVhu.44R2, AAVhu.44R3, AAVhu.45, AAVhu.46, AAVhu.47, AAVhu.48, AAVhu.48R1, AAVhu.48R2, AAVhu.48R3, AAVhu.49, AAVhu.51, AAVhu.52, AAVhu.54, AAVhu.55, AAVhu.56, AAVhu.57, AAVhu.58, AAVhu.60, AAVhu.61, AAVhu.63, AAVhu.64, AAVhu.66, AAVhu.67, AAVhu.14/9, AAVhu.t 19, AAVrh.2, AAVrh.2R, AAVrh.8, AAVrh.8R, AAVrh.10, AAVrh.12, AAVrh.13, AAVrh.13R, AAVrh.14, AAVrh.17, AAVrh.18, AAVrh.19, AAVrh.20, AAVrh.21, AAVrh.22, AAVrh.23, AAVrh.24, AAVrh.25, AAVrh.31, AAVrh.32, AAVrh.33, AAVrh.34, AAVrh.35, AAVrh.36, AAVrh.37, AAVrh.37R2, AAVrh.38, AAVrh.39, AAVrh.40, AAVrh.46, AAVrh.48, AAVrh.48.1, AAVrh.48.1.2, AAVrh.48.2, AAVrh.49, AAVrh.51, AAVrh.52, AAVrh.53, AAVrh.54, AAVrh.56, AAVrh.57, AAVrh.58, AAVrh.61, AAVrh.64, AAVrh.64R1, AAVrh.64R2, AAVrh.67, AAVrh.73, AAVrh.74, AAVrh8R, AAVrh8R A586R mutant, AAVrh8R R533A mutant, AAAV, BAAV, caprine AAV, bovine AAV, AAVhE1.1, AAVhEr1.5, AAVhER1.14, AAVhEr1.8, AAVhEr1.16, AAVhEr1.18, AAVhEr1.35, AAVhEr1.7, AAVhEr1.36, AAVhEr2.29, AAVhEr2.4, AAVhEr2.16, AAVhEr2.30, AAVhEr2.31, AAVhEr2.36, AAVhER1.23, AAVhEr3.1, AAV2.5T, AAV-PAEC, AAV-LK01, AAV-LK02, AAV-LK03, AAV-LK04, AAV-LK05, AAV-LK06, AAV-LK07, AAV-LK08, AAV-LK09, AAV-LK10, AAV-LK11, AAV-LK12, AAV-LK13, AAV-LK14, AAV-LK15, AAV-LK16, AAV-LK17, AAV-LK18, AAV-LK19, AAV-PAEC2, AAV-PAEC4, AAV-PAEC6, AAV-PAEC7, AAV-PAEC8, AAV-PAEC11, AAV-PAEC12, AAV-2-pre-miRNA-101, AAV-8h, AAV-8b, AAV-h, AAV-b, AAV SM 10-2, AAV Shuffle 100-1, AAV Shuffle 100-3, AAV Shuffle 100-7, AAV Shuffle 10-2, AAV Shuffle 10-6, AAV Shuffle 10-8, AAV Shuffle 100-2, AAV SM 10-1, AAV SM 10-8, AAV SM 100-3, AAV SM 100-10, BNP61 AAV, BNP62 AAV, BNP63 AAV, AAVrh.50, AAVrh.43, AAVrh.62, AAVrh.48, AAVhu.19, AAVhu.11, AAVhu.53, AAV4-8/rh.64, AAVLG-9/hu.39, AAV54.5/hu.23, AAV54.2/hu.22, AAV54.7/hu.24, AAV54.1/hu.21, AAV54.4R/hu.27, AAV46.2/hu.28, AAV46.6/hu.29, AAV128.1/hu.43, true type AAV (ttAAV), UPENN AAV 10, Japanese AAV 10 serotypes, AAV CBr-7.1, AAV CBr-7.10, AAV CBr-7.2, AAV CBr-7.3, AAV CBr-7.4, AAV CBr-7.5, AAV CBr-7.7, AAV CBr-7.8, AAV CBr-B7.3, AAV CBr-B7.4, AAV CBr-E1, AAV CBr-E2, AAV CBr-E3, AAV CBr-E4, AAV CBr-E5, AAV CBr-c5, AAV CBr-E6, AAV CBr-E7, AAV CBr-E8, AAV CHt-1, AAV CHt-2, AAV CHt-3, AAV CHt-6.1, AAV CHt-6.10, AAV CHt-6.5, AAV CHt-6.6, AAV CHt-6.7, AAV CHt-6.8, AAV CHt-P1, AAV CHt-P2, AAV CHt-P5, AAV CHt-P6, AAV CHt-P8, AAV CHt-P9, AAV CKd-1, AAV CKd-10, AAV CKd-2, AAV CKd-3, AAV CKd-4, AAV CKd-6, AAV CKd-7, AAV CKd-8, AAV CKd-B1, AAV CKd-B2, AAV CKd-B3, AAV CKd-B4, AAV CKd-B5, AAV CKd-B6, AAV CKd-B7, AAV CKd-B8, AAV CKd-H1, AAV CKd-H2, AAV CKd-H3, AAV CKd-H4, AAV CKd-H5, AAV CKd-H6, AAV CKd-N3, AAV CKd-N4, AAV CKd-N9, AAV CLg-F1, AAV CLg-F2, AAV CLg-F3, AAV CLg-F4, AAV CLg-F5, AAV CLg-F6, AAV CLg-F7, AAV CLg-F8, AAV CLv-1, AAV CLv1-1, AAV Clv1-10, AAV CLv1-2, AAV CLv-12, AAV CLv1-3, AAV CLv-13, AAV CLv1-4, AAV Clv1-7, AAV Clv1-8, AAV Clv1-9, AAV CLv-2, AAV CLv-3, AAV CLv-4, AAV CLv-6, AAV CLv-8, AAV CLv-D1, AAV CLv-D2, AAV CLv-D3, AAV CLv-D4, AAV CLv-D5, AAV CLv-D6, AAV CLv-D7, AAV CLv-D8, AAV CLv-E1, AAV CLv-K1, AAV CLv-K3, AAV CLv-K6, AAV CLv-L4, AAV CLv-L5, AAV CLv-L6, AAV CLv-M1, AAV CLv-M11, AAV CLv-M2, AAV CLv-M5, AAV CLv-M6, AAV CLv-M7, AAV CLv-M8, AAV CLv-M9, AAV CLv-R1, AAV CLv-R2, AAV CLv-R3, AAV CLv-R4, AAV CLv-R5, AAV CLv-R6, AAV CLv-R7, AAV CLv-R8, AAV CLv-R9, AAV CSp-1, AAV CSp-10, AAV CSp-11, AAV CSp-2, AAV CSp-3, AAV CSp-4, AAV CSp-6, AAV CSp-7, AAV CSp-8, AAV CSp-8.10, AAV CSp-8.2, AAV CSp-8.4, AAV CSp-8.5, AAV CSp-8.6, AAV CSp-8.7, AAV CSp-8.8, AAV CSp-8.9, AAV CSp-9, AAV.hu.48R3, AAV.VR-355, AAV3B, AAV4, AAV5, AAVF1/HSC1, AAVF11/HSC11, AAVF12/HSC12, AAVF13/HSC13, AAVF14/HSC14, AAVF15/HSC15, AAVF16/HSC16, AAVF17/HSC17, AAVF2/HSC2, AAVF3/HSC3, AAVF4/HSC4, AAVF5/HSC5, AAVF6/HSC6, AAVF7/HSC7, AAVF8/HSC8, AAVF9/HSC9, AAV-PHP.B (PHP.B), AAV-PHP.A (PHP.A), G2B-26, G2B-13, TH1.1-32 and/or TH1.1-35, and variants thereof. As a non-limiting example, the capsid of the recombinant AAV virus is AAV1. As a non-limiting example, the capsid of the recombinant AAV virus is AAV2. As a non-limiting example, the capsid of the recombinant AAV virus is AAVrh10. As a non-limiting example, the capsid of the recombinant AAV virus is AAV9 (hu14). As a non-limiting example, the capsid of the recombinant AAV virus is AAV-DJ. As a non-limiting example, the capsid of the recombinant AAV virus is AAV9.47. As a non-limiting example, the capsid of the recombinant AAV virus is AAV-DJ8. As a non-limiting example, the capsid of the recombinant AAV virus is AAV-PHP.B. As a non-limiting example, the capsid of the recombinant AAV virus is AAV-PHP.A.

[0292] In some embodiments, the AAV serotype may be, or have, a sequence as described in United States Publication No. US20030138772, the contents of which are herein incorporated by reference in their entirety, such as, but not limited to, AAV1 (SEQ ID NO: 6 and 64 of US20030138772), AAV2 (SEQ ID NO: 7 and 70 of US20030138772), AAV3 (SEQ ID NO: 8 and 71 of US20030138772), AAV4 (SEQ ID NO: 63 of US20030138772), AAV5 (SEQ ID NO: 114 of US20030138772), AAV6 (SEQ ID NO: 65 of US20030138772), AAV7 (SEQ ID NO: 1-3 of US20030138772), AAV8 (SEQ ID NO: 4 and 95 of US20030138772), AAV9 (SEQ ID NO: 5 and 100 of US20030138772), AAV10 (SEQ ID NO: 117 of US20030138772), AAV11 (SEQ ID NO: 118 of US20030138772), AAV12 (SEQ ID NO: 119 of US20030138772), AAVrh10 (amino acids 1 to 738 of SEQ ID NO: 81 of US20030138772), AAV16.3 (US20030138772 SEQ ID NO: 10), AAV29.3/bb.1 (US20030138772 SEQ ID NO: 11), AAV29.4 (US20030138772 SEQ ID NO: 12), AAV29.5/bb.2 (US20030138772 SEQ ID NO: 13), AAV1.3 (US20030138772 SEQ ID NO: 14), AAV13.3 (US20030138772 SEQ ID NO: 15), AAV24.1 (US20030138772 SEQ ID NO: 16), AAV27.3 (US20030138772 SEQ ID NO: 17), AAV7.2 (US20030138772 SEQ ID NO: 18), AAVC1 (US20030138772 SEQ ID NO: 19), AAVC3 (US20030138772 SEQ ID NO: 20), AAVC5 (US20030138772 SEQ ID NO: 21), AAVF1 (US20030138772 SEQ ID NO: 22), AAVF3 (US20030138772 SEQ ID NO: 23), AAVF5 (US20030138772 SEQ ID NO: 24), AAVH6 (US20030138772 SEQ ID NO: 25), AAVH2 (US20030138772 SEQ ID NO: 26), AAV42-8 (US20030138772 SEQ ID NO: 27), AAV42-15 (US20030138772 SEQ ID NO: 28), AAV42-5b (US20030138772 SEQ ID NO: 29), AAV42-1b (US20030138772 SEQ ID NO: 30), AAV42-13 (US20030138772 SEQ ID NO: 31), AAV42-3a (US20030138772 SEQ ID NO: 32), AAV42-4 (US20030138772 SEQ ID NO: 33), AAV42-5a (US20030138772 SEQ ID NO: 34), AAV42-10 (US20030138772 SEQ ID NO: 35), AAV42-3b (US20030138772 SEQ ID NO: 36), AAV42-11 (US20030138772 SEQ ID NO: 37), AAV42-6b (US20030138772 SEQ ID NO: 38), AAV43-1 (US20030138772 SEQ ID NO: 39), AAV43-5 (US20030138772 SEQ ID NO: 40), AAV43-12 (US20030138772 SEQ ID NO: 41), AAV43-20 (US20030138772 SEQ ID NO: 42), AAV43-21 (US20030138772 SEQ ID NO: 43), AAV43-23 (US20030138772 SEQ ID NO: 44), AAV43-25 (US20030138772 SEQ ID NO: 45), AAV44.1 (US20030138772 SEQ ID NO: 46), AAV44.5 (US20030138772 SEQ ID NO: 47), AAV223.1 (US20030138772 SEQ ID NO: 48), AAV223.2 (US20030138772 SEQ ID NO: 49), AAV223.4 (US20030138772 SEQ ID NO: 50), AAV223.5 (US20030138772 SEQ ID NO: 51), AAV223.6 (US20030138772 SEQ ID NO: 52), AAV223.7 (US20030138772 SEQ ID NO: 53), AAVA3.4 (US20030138772 SEQ ID NO: 54), AAVA3.5 (US20030138772 SEQ ID NO: 55), AAVA3.7 (US20030138772 SEQ ID NO: 56), AAVA3.3 (US20030138772 SEQ ID NO: 57), AAV42.12 (US20030138772 SEQ ID NO: 58), AAV44.2 (US20030138772 SEQ ID NO: 59), AAV42-2 (US20030138772 SEQ ID NO: 9), or variants thereof.

[0293] In some embodiments, the AAV serotype may be, or have, a sequence as described in United States Publication No. US20150159173, the contents of which are herein incorporated by reference in their entirety, such as, but not limited to, AAV2 (SEQ ID NO: 7 and 23 of US20150159173), rh20 (SEQ ID NO: 1 of US20150159173), rh32/33 (SEQ ID NO: 2 of US20150159173), rh39 (SEQ ID NO: 3, 20 and 36 of US20150159173), rh46 (SEQ ID NO: 4 and 22 of US20150159173), rh73 (SEQ ID NO: 5 of US20150159173), rh74 (SEQ ID NO: 6 of US20150159173), AAV6.1 (SEQ ID NO: 29 of US20150159173), rh.8 (SEQ ID NO: 41 of US20150159173), rh.48.1 (SEQ ID NO: 44 of US20150159173), hu.44 (SEQ ID NO: 45 of US20150159173), hu.29 (SEQ ID NO: 42 of US20150159173), hu.48 (SEQ ID NO: 38 of US20150159173), rh54 (SEQ ID NO: 49 of US20150159173), AAV2 (SEQ ID NO: 7 of US20150159173), cy.5 (SEQ ID NO: 8 and 24 of US20150159173), rh. 10 (SEQ ID NO: 9 and 25 of US20150159173), rh.13 (SEQ ID NO: 10 and 26 of US20150159173), AAV1 (SEQ ID NO: 11 and 27 of US20150159173), AAV3 (SEQ ID NO: 12 and 28 of US20150159173), AAV6 (SEQ ID NO: 13 and 29 of US20150159173), AAV7 (SEQ ID NO: 14 and 30 of US20150159173), AAV8 (SEQ ID NO: 15 and 31 of US20150159173), hu.13 (SEQ ID NO: 16 and 32 of US20150159173), hu.26 (SEQ ID NO: 17 and 33 of US20150159173), hu.37 (SEQ ID NO: 18 and 34 of US20150159173), hu.53 (SEQ ID NO: 19 and 35 of US20150159173), rh.43 (SEQ ID NO: 21 and 37 of US20150159173), rh2 (SEQ ID NO: 39 of US20150159173), rh.37 (SEQ ID NO: 40 of US20150159173), rh.64 (SEQ ID NO: 43 of US20150159173), rh.48 (SEQ ID NO: 44 of US20150159173), ch.5 (SEQ ID NO 46 of US20150159173), rh.67 (SEQ ID NO: 47 of US20150159173), rh.58 (SEQ ID NO: 48 of US20150159173), or variants thereof including, but not limited to Cy5R1, Cy5R2, Cy5R3, Cy5R4, rh.13R, rh.37R2, rh.2R, rh.8R, rh.48.1, rh.48.2, rh.48.1.2, hu.44R1, hu.44R2, hu.44R3, hu.29R, ch.5R1, rh64R1, rh64R2, AAV6.2, AAV6.1, AAV6.12, hu.48R1, hu.48R2, and hu.48R3.

[0294] In some embodiments, the AAV serotype may be, or have, a sequence as described in U.S. Pat. No. 7,198,951, the contents of which are herein incorporated by reference in their entirety, such as, but not limited to, AAV9 (SEQ ID NO: 1-3 of U.S. Pat. No. 7,198,951), AAV2 (SEQ ID NO: 4 of U.S. Pat. No. 7,198,951), AAV1 (SEQ ID NO: 5 of U.S. Pat. No. 7,198,951), AAV3 (SEQ ID NO: 6 of U.S. Pat. No. 7,198,951), and AAV8 (SEQ ID NO: 7 of U.S. Pat. No. 7,198,951).

[0295] In some embodiments, the AAV serotype may be, or have, a mutation in the AAV9 sequence as described by N Pulicherla et al. (Molecular Therapy 19 (6): 1070-1078 (2011), herein incorporated by reference in its entirety), such as but not limited to, AAV9.9, AAV9.11, AAV9.13, AAV9.16, AAV9.24, AAV9.45, AAV9.47, AAV9.61, AAV9.68, AAV9.84.

[0296] In some embodiments, the AAV serotype may be, or have, a sequence as described in U.S. Pat. No. 6,156,303, the contents of which are herein incorporated by reference in their entirety, such as, but not limited to, AAV3B (SEQ ID NO: 1 and 10 of U.S. Pat. No. 6,156,303), AAV6 (SEQ ID NO: 2, 7 and 11 of U.S. Pat. No. 6,156,303), AAV2 (SEQ ID NO: 3 and 8 of U.S. Pat. No. 6,156,303), AAV3A (SEQ ID NO: 4 and 9, of U.S. Pat. No. 6,156,303), or derivatives thereof.

[0297] In some embodiments, the AAV serotype may be, or have, a sequence as described in United States Publication No. US20140359799, the contents of which are herein incorporated by reference in their entirety, such as, but not limited to, AAV8 (SEQ ID NO: 1 of US20140359799), AAVDJ (SEQ ID NO: 2 and 3 of US20140359799), or variants thereof.

[0298] In some embodiments, the serotype may be AAVDJ (or AAV-DJ) or a variant thereof, such as AAVDJ8 (or AAV-DJ8), as described by Grimm et al. (Journal of Virology 82 (12): 5887-5911 (2008), herein incorporated by reference in its entirety). The amino acid sequence of AAVDJ8 may comprise two or more mutations in order to remove the heparin binding domain (HBD). As a non-limiting example, the AAV-DJ sequence described as SEQ ID NO: 1 in U.S. Pat. No. 7,588,772, the contents of which are herein incorporated by reference in their entirety, may comprise two mutations: (1) R587Q where arginine (R; Arg) at amino acid 587 is changed to glutamine (Q; Gln) and (2) R590T where arginine (R; Arg) at amino acid 590 is changed to threonine (T; Thr). As another non-limiting example, may comprise three mutations: (1) K406R where lysine (K; Lys) at amino acid 406 is changed to arginine (R; Arg), (2) R587Q where arginine (R; Arg) at amino acid 587 is changed to glutamine (Q; Gln) and (3) R590T where arginine (R; Arg) at amino acid 590 is changed to threonine (T; Thr).

[0299] In some embodiments, the AAV serotype may be, or have, a sequence of AAV4 as described in International Publication No. WO1998011244, the contents of which are herein incorporated by reference in their entirety, such as, but not limited to AAV4 (SEQ ID NO: 1-20 of WO1998011244).

[0300] In some embodiments, the AAV serotype may be, or have, a mutation in the AAV2 sequence to generate AAV2G9 as described in International Publication No. WO2014144229 and herein incorporated by reference in its entirety.

[0301] In some embodiments, the AAV serotype may be, or have, a sequence as described in International Publication No. WO2005033321, the contents of which are herein incorporated by reference in their entirety, such as, but not limited to AAV3-3 (SEQ ID NO: 217 of WO2005033321), AAV1 (SEQ ID NO: 219 and 202 of WO2005033321), AAV106.1/hu.37 (SEQ ID No: 10 of WO2005033321), AAV114.3/hu.40 (SEQ ID No: 11 of WO2005033321), AAV127.2/hu.41 (SEQ ID NO:6 and 8 of WO2005033321), AAV128.3/hu.44 (SEQ ID No: 81 of WO2005033321), AAV130.4/hu.48 (SEQ ID NO: 78 of WO2005033321), AAV145.1/hu.53 (SEQ ID No: 176 and 177 of WO2005033321), AAV145.6/hu.56 (SEQ ID NO: 168 and 192 of WO2005033321), AAV16.12/hu.11 (SEQ ID NO: 153 and 57 of WO2005033321), AAV16.8/hu.10 (SEQ ID NO: 156 and 56 of WO2005033321), AAV161.10/hu.60 (SEQ ID No: 170 of WO2005033321), AAV161.6/hu.61 (SEQ ID No: 174 of WO2005033321), AAV1-7/rh.48 (SEQ ID NO: 32 of WO2005033321), AAV1-8/rh.49 (SEQ ID NOs: 103 and 25 of WO2005033321), AAV2 (SEQ ID NO: 211 and 221 of WO2005033321), AAV2-15/rh.62 (SEQ ID No: 33 and 114 of WO2005033321), AAV2-3/rh.61 (SEQ ID NO: 21 of WO2005033321), AAV2-4/rh.50 (SEQ ID No: 23 and 108 of WO2005033321), AAV2-5/rh.51 (SEQ ID NO: 104 and 22 of WO2005033321), AAV3.1/hu.6 (SEQ ID NO: 5 and 84 of WO2005033321), AAV3.1/hu.9 (SEQ ID NO: 155 and 58 of WO2005033321), AAV3-11/rh.53 (SEQ ID NO: 186 and 176 of WO2005033321), AAV3-3 (SEQ ID NO: 200 of WO2005033321), AAV33.12/hu.17 (SEQ ID NO:4 of WO2005033321), AAV33.4/hu.15 (SEQ ID No: 50 of WO2005033321), AAV33.8/hu.16 (SEQ ID No: 51 of WO2005033321), AAV3-9/rh.52 (SEQ ID NO: 96 and 18 of WO2005033321), AAV4-19/rh.55 (SEQ ID NO: 117 of WO2005033321), AAV4-4 (SEQ ID NO: 201 and 218 of WO2005033321), AAV4-9/rh.54 (SEQ ID NO: 116 of WO2005033321), AAV5 (SEQ ID NO: 199 and 216 of WO2005033321), AAV52.1/hu.20 (SEQ ID NO: 63 of WO2005033321), AAV52/hu.19 (SEQ ID NO: 133 of WO2005033321), AAV5-22/rh.58 (SEQ ID No: 27 of WO2005033321), AAV5-3/rh.57 (SEQ ID NO: 105 of WO2005033321), AAV5-3/rh.57 (SEQ ID No: 26 of WO2005033321), AAV58.2/hu.25 (SEQ ID No: 49 of WO2005033321), AAV6 (SEQ ID NO: 203 and 220 of WO2005033321), AAV7 (SEQ ID NO: 222 and 213 of WO2005033321), AAV7.3/hu.7 (SEQ ID No: 55 of WO2005033321), AAV8 (SEQ ID NO: 223 and 214 of WO2005033321), AAVH-1/hu.1 (SEQ ID No: 46 of WO2005033321), AAVH-5/hu.3 (SEQ ID No: 44 of WO2005033321), AAVhu. 1 (SEQ ID NO: 144 of WO2005033321), AAVhu. 10 (SEQ ID NO: 156 of WO2005033321), AAVhu. 11 (SEQ ID NO: 153 of WO2005033321), AAVhu.12 (WO2005033321 SEQ ID NO: 59), AAVhu. 13 (SEQ ID NO: 129 of WO2005033321), AAVhu.14/AAV9 (SEQ ID NO: 123 and 3 of WO2005033321), AAVhu.15 (SEQ ID NO: 147 of WO2005033321), AAVhu. 16 (SEQ ID NO: 148 of WO2005033321), AAVhu.17 (SEQ ID NO: 83 of WO2005033321), AAVhu. 18 (SEQ ID NO: 149 of WO2005033321), AAVhu. 19 (SEQ ID NO: 133 of WO2005033321), AAVhu.2 (SEQ ID NO: 143 of WO2005033321), AAVhu.20 (SEQ ID NO: 134 of WO2005033321), AAVhu.21 (SEQ ID NO: 135 of WO2005033321), AAVhu.22 (SEQ ID NO: 138 of WO2005033321), AAVhu.23.2 (SEQ ID NO: 137 of WO2005033321), AAVhu.24 (SEQ ID NO: 136 of WO2005033321), AAVhu.25 (SEQ ID NO: 146 of WO2005033321), AAVhu.27 (SEQ ID NO: 140 of WO2005033321), AAVhu.29 (SEQ ID NO: 132 of WO2005033321), AAVhu.3 (SEQ ID NO: 145 of WO2005033321), AAVhu.31 (SEQ ID NO: 121 of WO2005033321), AAVhu.32 (SEQ ID NO: 122 of WO2005033321), AAVhu.34 (SEQ ID NO: 125 of WO2005033321), AAVhu.35 (SEQ ID NO: 164 of WO2005033321), AAVhu.37 (SEQ ID NO: 88 of WO2005033321), AAVhu.39 (SEQ ID NO: 102 of WO2005033321), AAVhu.4 (SEQ ID NO: 141 of WO2005033321), AAVhu.40 (SEQ ID NO: 87 of WO2005033321), AAVhu.41 (SEQ ID NO: 91 of WO2005033321), AAVhu.42 (SEQ ID NO: 85 of WO2005033321), AAVhu.43 (SEQ ID NO: 160 of WO2005033321), AAVhu.44 (SEQ ID NO: 144 of WO2005033321), AAVhu.45 (SEQ ID NO: 127 of WO2005033321), AAVhu.46 (SEQ ID NO: 159 of WO2005033321), AAVhu.47 (SEQ ID NO: 128 of WO2005033321), AAVhu.48 (SEQ ID NO: 157 of WO2005033321), AAVhu.49 (SEQ ID NO: 189 of WO2005033321), AAVhu.51 (SEQ ID NO: 190 of WO2005033321), AAVhu.52 (SEQ ID NO: 191 of WO2005033321), AAVhu.53 (SEQ ID NO: 186 of WO2005033321), AAVhu.54 (SEQ ID NO: 188 of WO2005033321), AAVhu.55 (SEQ ID NO: 187 of WO2005033321), AAVhu.56 (SEQ ID NO: 192 of WO2005033321), AAVhu.57 (SEQ ID NO: 193 of WO2005033321), AAVhu.58 (SEQ ID NO: 194 of WO2005033321), AAVhu.6 (SEQ ID NO: 84 of WO2005033321), AAVhu.60 (SEQ ID NO: 184 of WO2005033321), AAVhu.61 (SEQ ID NO: 185 of WO2005033321), AAVhu.63 (SEQ ID NO: 195 of WO2005033321), AAVhu.64 (SEQ ID NO: 196 of WO2005033321), AAVhu.66 (SEQ ID NO: 197 of WO2005033321), AAVhu.67 (SEQ ID NO: 198 of WO2005033321), AAVhu.7 (SEQ ID NO: 150 of WO2005033321), AAVhu.8 (WO2005033321 SEQ ID NO: 12), AAVhu.9 (SEQ ID NO: 155 of WO2005033321), AAVLG-10/rh.40 (SEQ ID No: 14 of WO2005033321), AAVLG-4/rh.38 (SEQ ID NO: 86 of WO2005033321), AAVLG-4/rh.38 (SEQ ID No: 7 of WO2005033321), AAVN721-8/rh.43 (SEQ ID NO: 163 of WO2005033321), AAVN721-8/rh.43 (SEQ ID No: 43 of WO2005033321), AAVpi.1 (WO2005033321 SEQ ID NO: 28), AAVpi.2 (WO2005033321 SEQ ID NO: 30), AAVpi.3 (WO2005033321 SEQ ID NO: 29), AAVrh.38 (SEQ ID NO: 86 of WO2005033321), AAVrh.40 (SEQ ID NO: 92 of WO2005033321), AAVrh.43 (SEQ ID NO: 163 of WO2005033321), AAVrh.44 (WO2003033321 SEQ ID NO: 34), AAVrh.45 (WO2005033321 SEQ ID NO: 41), AAVrh.47 (WO2005033321 SEQ ID NO: 38), AAVrh.48 (SEQ ID NO: 115 of WO2005033321), AAVrh.49 (SEQ ID NO: 103 of WO2005033321), AAVrh.50 (SEQ ID NO: 108 of WO2005033321), AAVrh.51 (SEQ ID NO: 104 of WO2005033321), AAVrh.52 (SEQ ID NO: 96 of WO2005033321), AAVrh.53 (SEQ ID NO: 97 of WO2005033321), AAVrh.55 (WO2005033321 SEQ ID NO: 37), AAVrh.56 (SEQ ID NO: 152 of WO2005033321), AAVrh.57 (SEQ ID NO: 105 of WO2005033321), AAVrh.58 (SEQ ID NO: 106 of WO2005033321), AAVrh.59 (WO2005033321 SEQ ID NO: 42), AAVrh.60 (WO2005033321 SEQ ID NO: 31), AAVrh.61 (SEQ ID NO: 107 of WO2005033321), AAVrh.62 (SEQ ID NO: 114 of WO2005033321), AAVrh.64 (SEQ ID NO: 99 of WO2005033321), AAVrh.65 (WO2005033321 SEQ ID NO: 35), AAVrh.68 (WO2005033321 SEQ ID NO: 16), AAVrh.69 (WO2005033321 SEQ ID NO: 39), AAVrh.70 (WO2005033321 SEQ ID NO: 20), AAVrh.72 (WO2005033321 SEQ ID NO: 9), or variants thereof including, but not limited to, AAVcy.2, AAVcy.3, AAVcy.4, AAVcy.5, AAVcy.6, AAVrh.12, AAVrh.17, AAVrh.18, AAVrh.19, AAVrh.21, AAVrh.22, AAVrh.23, AAVrh.24, AAVrh.25, AAVrh.25/42 15, AAVrh.31, AAVrh.32, AAVrh.33, AAVrh.34, AAVrh.35, AAVrh.36, AAVrh.37, AAVrh14. Non-limiting examples of variants include SEQ ID NO: 13, 15, 17, 19, 24, 36, 40, 45, 47, 48, 51-54, 60-62, 64-77, 79, 80, 82, 89, 90, 93-95, 98, 100, 101, 109-113, 118-120, 124, 126, 131, 139, 142, 151,154, 158, 161, 162, 165-183, 202, 204-212, 215, 219, 224-236, of WO2005033321, the contents of which are herein incorporated by reference in their entirety.

[0302] In some embodiments, the AAV serotype may be, or have, a sequence as described in International Publication No. WO2015168666, the contents of which are herein incorporated by reference in their entirety, such as, but not limited to, AAVrh8R (SEQ ID NO: 9 of WO2015168666), AAVrh8R A586R mutant (SEQ ID NO: 10 of WO2015168666), AAVrh8R R533A mutant (SEQ ID NO: 11 of WO2015168666), or variants thereof.

[0303] In some embodiments, the AAV serotype may be, or have, a sequence as described in U.S. Pat. No. 9,233,131, the contents of which are herein incorporated by reference in their entirety, such as, but not limited to, AAVhE1.1 (SEQ ID NO:44 of U.S. Pat. No. 9,233,131), AAVhEr1.5 (SEQ ID NO:45 of U.S. Pat. No. 9,233,131), AAVhER1.14 (SEQ ID NO:46 of U.S. Pat. No. 9,233,131), AAVhEr1.8 (SEQ ID NO:47 of U.S. Pat. No. 9,233,131), AAVhEr1.16 (SEQ ID NO:48 of U.S. Pat. No. 9,233,131), AAVhEr1.18 (SEQ ID NO:49 of U.S. Pat. No. 9,233,131), AAVhEr1.35 (SEQ ID NO:50 of U.S. Pat. No. 9,233,131), AAVhEr1.7 (SEQ ID NO:51 of U.S. Pat. No. 9,233,131), AAVhEr1.36 (SEQ ID NO:52 of U.S. Pat. No. 9,233,131), AAVhEr2.29 (SEQ ID NO:53 of U.S. Pat. No. 9,233,131), AAVhEr2.4 (SEQ ID NO:54 of U.S. Pat. No. 9,233,131), AAVhEr2.16 (SEQ ID NO:55 of U.S. Pat. No. 9,233,131), AAVhEr2.30 (SEQ ID NO:56 of U.S. Pat. No. 9,233,131), AAVhEr2.31 (SEQ ID NO:58 of U.S. Pat. No. 9,233,131), AAVhEr2.36 (SEQ ID NO:57 of U.S. Pat. No. 9,233,131), AAVhER1.23 (SEQ ID NO:53 of U.S. Pat. No. 9,233,131), AAVhEr3.1 (SEQ ID NO:59 of U.S. Pat. No. 9,233,131), AAV2.5T (SEQ ID NO:42 of U.S. Pat. No. 9,233,131), or variants thereof.

[0304] In some embodiments, the AAV serotype may be, or have, a sequence as described in United States Patent Publication No. US20150376607, the contents of which are herein incorporated by reference in their entirety, such as, but not limited to, AAV-PAEC (SEQ ID NO: 1 of US20150376607), AAV-LK01 (SEQ ID NO:2 of US20150376607), AAV-LK02 (SEQ ID NO: 3 of US20150376607), AAV-LK03 (SEQ ID NO:4 of US20150376607), AAV-LK04 (SEQ ID NO:5 of US20150376607), AAV-LK05 (SEQ ID NO:6 of US20150376607), AAV-LK06 (SEQ ID NO:7 of US20150376607), AAV-LK07 (SEQ ID NO:8 of US20150376607), AAV-LK08 (SEQ ID NO:9 of US20150376607), AAV-LK09 (SEQ ID NO:10 of US20150376607), AAV-LK10 (SEQ ID NO:11 of US20150376607), AAV-LK11 (SEQ ID NO: 12 of US20150376607), AAV-LK12 (SEQ ID NO:13 of US20150376607), AAV-LK13 (SEQ ID NO:14 of US20150376607), AAV-LK14 (SEQ ID NO:15 of US20150376607), AAV-LK15 (SEQ ID NO:16 of US20150376607), AAV-LK16 (SEQ ID NO:17 of US20150376607), AAV-LK17 (SEQ ID NO:18 of US20150376607), AAV-LK18 (SEQ ID NO:19 of US20150376607), AAV-LK19 (SEQ ID NO:20 of US20150376607), AAV-PAEC2 (SEQ ID NO: 21 of US20150376607), AAV-PAEC4 (SEQ ID NO:22 of US20150376607), AAV-PAEC6 (SEQ ID NO:23 of US20150376607), AAV-PAEC7 (SEQ ID NO:24 of US20150376607), AAV-PAEC8 (SEQ ID NO:25 of US20150376607), AAV-PAEC11 (SEQ ID NO:26 of US20150376607), AAV-PAEC12 (SEQ ID NO:27, of US20150376607), or variants thereof.

[0305] In some embodiments, the AAV serotype may be, or have, a sequence as described in U.S. Pat. No. 9,163,261, the contents of which are herein incorporated by reference in their entirety, such as, but not limited to, AAV-2-pre-miRNA-101 (SEQ ID NO: 1 U.S. Pat. No. 9,163,261), or variants thereof.

[0306] In some embodiments, the AAV serotype may be, or have, a sequence as described in United States Patent Publication No. US20150376240, the contents of which are herein incorporated by reference in their entirety, such as, but not limited to, AAV-8h (SEQ ID NO: 6 of US20150376240), AAV-8b (SEQ ID NO: 5 of US20150376240), AAV-h (SEQ ID NO: 2 of US20150376240), AAV-b (SEQ ID NO: 1 of US20150376240), or variants thereof.

[0307] In some embodiments, the AAV serotype may be, or have, a sequence as described in United States Patent Publication No. US20160017295, the contents of which are herein incorporated by reference in their entirety, such as, but not limited to, AAV SM 10-2 (SEQ ID NO: 22 of US20160017295), AAV Shuffle 100-1 (SEQ ID NO: 23 of US20160017295), AAV Shuffle 100-3 (SEQ ID NO: 24 of US20160017295), AAV Shuffle 100-7 (SEQ ID NO: 25 of US20160017295), AAV Shuffle 10-2 (SEQ ID NO: 34 of US20160017295), AAV Shuffle 10-6 (SEQ ID NO: 35 of US20160017295), AAV Shuffle 10-8 (SEQ ID NO: 36 of US20160017295), AAV Shuffle 100-2 (SEQ ID NO: 37 of US20160017295), AAV SM 10-1 (SEQ ID NO: 38 of US20160017295), AAV SM 10-8 (SEQ ID NO: 39 of US20160017295), AAV SM 100-3 (SEQ ID NO: 40 of US20160017295), AAV SM 100-10 (SEQ ID NO: 41 of US20160017295), or variants thereof.

[0308] In some embodiments, the AAV serotype may be, or have, a sequence as described in United States Patent Publication No. US20150238550, the contents of which are herein incorporated by reference in their entirety, such as, but not limited to, BNP61 AAV (SEQ ID NO: 1 of US20150238550), BNP62 AAV (SEQ ID NO: 3 of US20150238550), BNP63 AAV (SEQ ID NO: 4 of US20150238550), or variants thereof.

[0309] In some embodiments, the AAV serotype may be or may have a sequence as described in United States Patent Publication No. US20150315612, the contents of which are herein incorporated by reference in their entirety, such as, but not limited to, AAVrh.50 (SEQ ID NO: 108 of US20150315612), AAVrh.43 (SEQ ID NO: 163 of US20150315612), AAVrh.62 (SEQ ID NO: 114 of US20150315612), AAVrh.48 (SEQ ID NO: 115 of US20150315612), AAVhu.19 (SEQ ID NO: 133 of US20150315612), AAVhu.11 (SEQ ID NO: 153 of US20150315612), AAVhu.53 (SEQ ID NO: 186 of US20150315612), AAV4-8/rh.64 (SEQ ID No: 15 of US20150315612), AAVLG-9/hu.39 (SEQ ID No: 24 of US20150315612), AAV54.5/hu.23 (SEQ ID No: 60 of US20150315612), AAV54.2/hu.22 (SEQ ID No: 67 of US20150315612), AAV54.7/hu.24 (SEQ ID No: 66 of US20150315612), AAV54.1/hu.21 (SEQ ID No: 65 of US20150315612), AAV54.4R/hu.27 (SEQ ID No: 64 of US20150315612), AAV46.2/hu.28 (SEQ ID No: 68 of US20150315612), AAV46.6/hu.29 (SEQ ID No: 69 of US20150315612), AAV128.1/hu.43 (SEQ ID No: 80 of US20150315612), or variants thereof.

[0310] In some embodiments, the AAV serotype may be, or have, a sequence as described in International Publication No. WO2015121501, the contents of which are herein incorporated by reference in their entirety, such as, but not limited to, true type AAV (ttAAV) (SEQ ID NO: 2 of WO2015121501), “UPenn AAV10” (SEQ ID NO: 8 of WO2015121501), “Japanese AAV10” (SEQ ID NO: 9 of WO2015121501), or variants thereof.

[0311] According to the present invention, AAV capsid serotype selection or use may be from a variety of species. In one embodiment, the AAV may be an avian AAV (AAAV). The AAAV serotype may be, or have, a sequence as described in U.S. Pat. No. 9,238,800, the contents of which are herein incorporated by reference in their entirety, such as, but not limited to, AAAV (SEQ ID NO: 1, 2, 4, 6, 8, 10, 12, and 14 of U.S. Pat. No. 9,238,800), or variants thereof.

[0312] In one embodiment, the AAV may be a bovine AAV (BAAV). The BAAV serotype may be, or have, a sequence as described in U.S. Pat. No. 9,193,769, the contents of which are herein incorporated by reference in their entirety, such as, but not limited to, BAAV (SEQ ID NO: 1 and 6 of U.S. Pat. No. 9,193,769), or variants thereof. The BAAV serotype may be or have a sequence as described in U.S. Pat. No. 7,427,396, the contents of which are herein incorporated by reference in their entirety, such as, but not limited to, BAAV (SEQ ID NO: 5 and 6 of U.S. Pat. No. 7,427,396), or variants thereof.

[0313] In one embodiment, the AAV may be a caprine AAV. The caprine AAV serotype may be, or have, a sequence as described in U.S. Pat. No. 7,427,396, the contents of which are herein incorporated by reference in their entirety, such as, but not limited to, caprine AAV (SEQ ID NO: 3 of U.S. Pat. No. 7,427,396), or variants thereof.

[0314] In other embodiments, the AAV may be engineered as a hybrid AAV from two or more parental serotypes. In one embodiment, the AAV may be AAV2G9 which comprises sequences from AAV2 and AAV9. The AAV2G9 AAV serotype may be, or have, a sequence as described in United States Patent Publication No. US20160017005, the contents of which are herein incorporated by reference in its entirety.

[0315] In one embodiment, the AAV may be a serotype generated by the AAV9 capsid library with mutations in amino acids 390-627 (VP1 numbering) as described by Pulicherla et al. (Molecular Therapy 19 (6): 1070-1078 (2011), the contents of which are herein incorporated by reference in their entirety. The serotype and corresponding nucleotide and amino acid substitutions may be, but is not limited to, AAV9.1 (G1594C; D532H), AAV6.2 (T1418A and T1436X; V473D and 1479K), AAV9.3 (T1238A; F413Y), AAV9.4 (T1250C and A1617T; F417S), AAV9.5 (A1235G, A1314T, A1642G, C1760T; Q412R, T548A, A587V), AAV9.6 (T1231A; F411I), AAV9.9 (G1203A, G1785T; W595C), AAV9.10 (A1500G, T1676C; M559T), AAV9.11 (A1425T, A1702C, A1769T; T568P, Q590L), AAV9.13 (A1369C, A1720T; N457H, T574S), AAV9.14 (T1340A, T1362C, T1560C, G1713A; L447H), AAV9.16 (A1775T; Q592L), AAV9.24 (T1507C, T1521G; W503R), AAV9.26 (A1337G, A1769C; Y446C, Q590P), AAV9.33 (A1667C; D556A), AAV9.34 (A1534G, C1794T; N512D), AAV9.35 (A1289T, T1450A, C1494T, A1515T, C1794A, G1816A; Q430L, Y484N, N98K, V606I), AAV9.40 (A1694T, E565V), AAV9.41 (A1348T, T1362C; T450S), AAV9.44 (A1684C, A1701T, A1737G; N562H, K567N), AAV9.45 (A1492T, C1804T; N498Y, L602F), AAV9.46 (G1441C, T1525C, T1549G; G481R, W509R, L517V), 9.47 (G1241A, G1358A, A1669G, C1745T; S414N, G453D, K557E, T582I), AAV9.48 (C1445T, A1736T; P482L, Q579L), AAV9.50 (A1638T, C1683T, T1805A; Q546H, L602H), AAV9.53 (G1301A, A1405C, C1664T, G1811T; R134Q, S469R, A555V, G604V), AAV9.54 (C1531A, T1609A; L511I, L537M), AAV9.55 (T1605A; F535L), AAV9.58 (C1475T, C1579A; T4921, H527N), AAV.59 (T1336C; Y446H), AAV9.61 (A1493T; N498I), AAV9.64 (C1531A, A1617T; L511I), AAV9.65 (C1335T, T1530C, C1568A; A523D), AAV9.68 (C1510A; P504T), AAV9.80 (G1441A; G481R), AAV9.83 (C1402A, A1500T; P468T, E500D), AAV9.87 (T1464C, T1468C; S490P), AAV9.90 (A1196T; Y399F), AAV9.91 (T1316G, A1583T, C1782G, T1806C; L439R, K528I), AAV9.93 (A1273G, A1421G, A1638C, C1712T, G1732A, A1744T, A1832T; S425G, Q474R, Q546H, P571L, G578R, T582S, D611V), AAV9.94 (A1675T; M559L) and AAV9.95 (T1605A; F535L).

[0316] In some embodiments, the AAV serotype may be, or have, a sequence as described in International Publication No. WO2016049230, the contents of which are herein incorporated by reference in their entirety, such as, but not limited to AAVF1/HSC1 (SEQ ID NO: 2 and 20 of WO2016049230), AAVF2/HSC2 (SEQ ID NO: 3 and 21 of WO2016049230), AAVF3/HSC3 (SEQ ID NO: 5 and 22 of WO2016049230), AAVF4/HSC4 (SEQ ID NO: 6 and 23 of WO2016049230), AAVF5/HSC5 (SEQ ID NO: 11 and 25 of WO2016049230), AAVF6/HSC6 (SEQ ID NO: 7 and 24 of WO2016049230), AAVF7/HSC7 (SEQ ID NO: 8 and 27 of WO2016049230), AAVF8/HSC8 (SEQ ID NO: 9 and 28 of WO2016049230), AAVF9/HSC9 (SEQ ID NO: 10 and 29 of WO2016049230), AAVF11/HSC11 (SEQ ID NO: 4 and 26 of WO2016049230), AAVF12/HSC12 (SEQ ID NO: 12 and 30 of WO2016049230), AAVF13/HSC13 (SEQ ID NO: 14 and 31 of WO2016049230), AAVF14/HSC14 (SEQ ID NO: 15 and 32 of WO2016049230), AAVF15/HSC15 (SEQ ID NO: 16 and 33 of WO2016049230), AAVF16/HSC16 (SEQ ID NO: 17 and 34 of WO2016049230), AAVF17/HSC17 (SEQ ID NO: 13 and 35 of WO2016049230), or variants or derivatives thereof.

[0317] In some embodiments, the AAV serotype may be, or have, a sequence as described in U.S. Pat. No. 8,734,809, the contents of which are herein incorporated by reference in their entirety, such as, but not limited to, AAV CBr-E1 (SEQ ID NO: 13 and 87 of U.S. Pat. No. 8,734,809), AAV CBr-E2 (SEQ ID NO: 14 and 88 of U.S. Pat. No. 8,734,809), AAV CBr-E3 (SEQ ID NO: 15 and 89 of U.S. Pat. No. 8,734,809), AAV CBr-E4 (SEQ ID NO: 16 and 90 of U.S. Pat. No. 8,734,809), AAV CBr-E5 (SEQ ID NO: 17 and 91 of U.S. Pat. No. 8,734,809), AAV CBr-c5 (SEQ ID NO: 18 and 92 of U.S. Pat. No. 8,734,809), AAV CBr-E6 (SEQ ID NO: 19 and 93 of U.S. Pat. No. 8,734,809), AAV CBr-E7 (SEQ ID NO: 20 and 94 of U.S. Pat. No. 8,734,809), AAV CBr-E8 (SEQ ID NO: 21 and 95 of U.S. Pat. No. 8,734,809), AAV CLv-D1 (SEQ ID NO: 22 and 96 of U.S. Pat. No. 8,734,809), AAV CLv-D2 (SEQ ID NO: 23 and 97 of U.S. Pat. No. 8,734,809), AAV CLv-D3 (SEQ ID NO: 24 and 98 of U.S. Pat. No. 8,734,809), AAV CLv-D4 (SEQ ID NO: 25 and 99 of U.S. Pat. No. 8,734,809), AAV CLv-D5 (SEQ ID NO: 26 and 100 of U.S. Pat. No. 8,734,809), AAV CLv-D6 (SEQ ID NO: 27 and 101 of U.S. Pat. No. 8,734,809), AAV CLv-D7 (SEQ ID NO: 28 and 102 of U.S. Pat. No. 8,734,809), AAV CLv-D8 (SEQ ID NO: 29 and 103 of U.S. Pat. No. 8,734,809), AAV CLv-E1 (SEQ ID NO: 13 and 87 of U.S. Pat. No. 8,734,809), AAV CLv-R1 (SEQ ID NO: 30 and 104 of U.S. Pat. No. 8,734,809), AAV CLv-R2 (SEQ ID NO: 31 and 105 of U.S. Pat. No. 8,734,809), AAV CLv-R3 (SEQ ID NO: 32 and 106 of U.S. Pat. No. 8,734,809), AAV CLv-R4 (SEQ ID NO: 33 and 107 of U.S. Pat. No. 8,734,809), AAV CLv-R5 (SEQ ID NO: 34 and 108 of U.S. Pat. No. 8,734,809), AAV CLv-R6 (SEQ ID NO: 35 and 109 of U.S. Pat. No. 8,734,809), AAV CLv-R7 (SEQ ID NO: 36 and 110 of U.S. Pat. No. 8,734,809), AAV CLv-R8 (SEQ ID NO: 37 and 111 of U.S. Pat. No. 8,734,809), AAV CLv-R9 (SEQ ID NO: 38 and 112 of U.S. Pat. No. 8,734,809), AAV CLg-F1 (SEQ ID NO: 39 and 113 of U.S. Pat. No. 8,734,809), AAV CLg-F2 (SEQ ID NO: 40 and 114 of U.S. Pat. No. 8,734,809), AAV CLg-F3 (SEQ ID NO: 41 and 115 of U.S. Pat. No. 8,734,809), AAV CLg-F4 (SEQ ID NO: 42 and 116 of U.S. Pat. No. 8,734,809), AAV CLg-F5 (SEQ ID NO: 43 and 117 of U.S. Pat. No. 8,734,809), AAV CLg-F6 (SEQ ID NO: 43 and 117 of U.S. Pat. No. 8,734,809), AAV CLg-F7 (SEQ ID NO: 44 and 118 of U.S. Pat. No. 8,734,809), AAV CLg-F8 (SEQ ID NO: 43 and 117 of U.S. Pat. No. 8,734,809), AAV CSp-1 (SEQ ID NO: 45 and 119 of U.S. Pat. No. 8,734,809), AAV CSp-10 (SEQ ID NO: 46 and 120 of U.S. Pat. No. 8,734,809), AAV CSp-11 (SEQ ID NO: 47 and 121 of U.S. Pat. No. 8,734,809), AAV CSp-2 (SEQ ID NO: 48 and 122 of U.S. Pat. No. 8,734,809), AAV CSp-3 (SEQ ID NO: 49 and 123 of U.S. Pat. No. 8,734,809), AAV CSp-4 (SEQ ID NO: 50 and 124 of U.S. Pat. No. 8,734,809), AAV CSp-6 (SEQ ID NO: 51 and 125 of U.S. Pat. No. 8,734,809), AAV CSp-7 (SEQ ID NO: 52 and 126 of U.S. Pat. No. 8,734,809), AAV CSp-8 (SEQ ID NO: 53 and 127 of U.S. Pat. No. 8,734,809), AAV CSp-9 (SEQ ID NO: 54 and 128 of U.S. Pat. No. 8,734,809), AAV CHt-2 (SEQ ID NO: 55 and 129 of U.S. Pat. No. 8,734,809), AAV CHt-3 (SEQ ID NO: 56 and 130 of U.S. Pat. No. 8,734,809), AAV CKd-1 (SEQ ID NO: 57 and 131 of U.S. Pat. No. 8,734,809), AAV CKd-10 (SEQ ID NO: 58 and 132 of U.S. Pat. No. 8,734,809), AAV CKd-2 (SEQ ID NO: 59 and 133 of U.S. Pat. No. 8,734,809), AAV CKd-3 (SEQ ID NO: 60 and 134 of U.S. Pat. No. 8,734,809), AAV CKd-4 (SEQ ID NO: 61 and 135 of U.S. Pat. No. 8,734,809), AAV CKd-6 (SEQ ID NO: 62 and 136 of U.S. Pat. No. 8,734,809), AAV CKd-7 (SEQ ID NO: 63 and 137 of U.S. Pat. No. 8,734,809), AAV CKd-8 (SEQ ID NO: 64 and 138 of U.S. Pat. No. 8,734,809), AAV CLv-1 (SEQ ID NO: 35 and 139 of U.S. Pat. No. 8,734,809), AAV CLv-12 (SEQ ID NO: 66 and 140 of U.S. Pat. No. 8,734,809), AAV CLv-13 (SEQ ID NO: 67 and 141 of U.S. Pat. No. 8,734,809), AAV CLv-2 (SEQ ID NO: 68 and 142 of U.S. Pat. No. 8,734,809), AAV CLv-3 (SEQ ID NO: 69 and 143 of U.S. Pat. No. 8,734,809), AAV CLv-4 (SEQ ID NO: 70 and 144 of U.S. Pat. No. 8,734,809), AAV CLv-6 (SEQ ID NO: 71 and 145 of U.S. Pat. No. 8,734,809), AAV CLv-8 (SEQ ID NO: 72 and 146 of U.S. Pat. No. 8,734,809), AAV CKd-B1 (SEQ ID NO: 73 and 147 of U.S. Pat. No. 8,734,809), AAV CKd-B2 (SEQ ID NO: 74 and 148 of U.S. Pat. No. 8,734,809), AAV CKd-B3 (SEQ ID NO: 75 and 149 of U.S. Pat. No. 8,734,809), AAV CKd-B4 (SEQ ID NO: 76 and 150 of U.S. Pat. No. 8,734,809), AAV CKd-B5 (SEQ ID NO: 77 and 151 of U.S. Pat. No. 8,734,809), AAV CKd-B6 (SEQ ID NO: 78 and 152 of U.S. Pat. No. 8,734,809), AAV CKd-B7 (SEQ ID NO: 79 and 153 of U.S. Pat. No. 8,734,809), AAV CKd-B8 (SEQ ID NO: 80 and 154 of U.S. Pat. No. 8,734,809), AAV CKd-H1 (SEQ ID NO: 81 and 155 of U.S. Pat. No. 8,734,809), AAV CKd-H2 (SEQ ID NO: 82 and 156 of U.S. Pat. No. 8,734,809), AAV CKd-H3 (SEQ ID NO: 83 and 157 of U.S. Pat. No. 8,734,809), AAV CKd-H4 (SEQ ID NO: 84 and 158 of U.S. Pat. No. 8,734,809), AAV CKd-H5 (SEQ ID NO: 85 and 159 of U.S. Pat. No. 8,734,809), AAV CKd-H6 (SEQ ID NO: 77 and 151 of U.S. Pat. No. 8,734,809), AAV CHt-1 (SEQ ID NO: 86 and 160 of U.S. Pat. No. 8,734,809), AAV CLv1-1 (SEQ ID NO: 171 of U.S. Pat. No. 8,734,809), AAV CLv1-2 (SEQ ID NO: 172 of U.S. Pat. No. 8,734,809), AAV CLv1-3 (SEQ ID NO: 173 of U.S. Pat. No. 8,734,809), AAV CLv1-4 (SEQ ID NO: 174 of U.S. Pat. No. 8,734,809), AAV Clv1-7 (SEQ ID NO: 175 of U.S. Pat. No. 8,734,809), AAV Clv1-8 (SEQ ID NO: 176 of U.S. Pat. No. 8,734,809), AAV Clv1-9 (SEQ ID NO: 177 of U.S. Pat. No. 8,734,809), AAV Clv1-10 (SEQ ID NO: 178 of U.S. Pat. No. 8,734,809), AAV.VR-355 (SEQ ID NO: 181 of U.S. Pat. No. 8,734,809), AAV.hu.48R3 (SEQ ID NO: 183 of U.S. Pat. No. 8,734,809), or variants or derivatives thereof.

[0318] In some embodiments, the AAV serotype may be, or have, a sequence as described in International Publication No. WO2016065001, the contents of which are herein incorporated by reference in their entirety, such as, but not limited to AAV CHt-P2 (SEQ ID NO: 1 and 51 of WO2016065001), AAV CHt-P5 (SEQ ID NO: 2 and 52 of WO2016065001), AAV CHt-P9 (SEQ ID NO: 3 and 53 of WO2016065001), AAV CBr-7.1 (SEQ ID NO: 4 and 54 of WO2016065001), AAV CBr-7.2 (SEQ ID NO: 5 and 55 of WO2016065001), AAV CBr-7.3 (SEQ ID NO: 6 and 56 of WO2016065001), AAV CBr-7.4 (SEQ ID NO: 7 and 57 of WO2016065001), AAV CBr-7.5 (SEQ ID NO: 8 and 58 of WO2016065001), AAV CBr-7.7 (SEQ ID NO: 9 and 59 of WO2016065001), AAV CBr-7.8 (SEQ ID NO: 10 and 60 of WO2016065001), AAV CBr-7.10 (SEQ ID NO: 11 and 61 of WO2016065001), AAV CKd-N3 (SEQ ID NO: 12 and 62 of WO2016065001), AAV CKd-N4 (SEQ ID NO: 13 and 63 of WO2016065001), AAV CKd-N9 (SEQ ID NO: 14 and 64 of WO2016065001), AAV CLv-L4 (SEQ ID NO: 15 and 65 of WO2016065001), AAV CLv-L5 (SEQ ID NO: 16 and 66 of WO2016065001), AAV CLv-L6 (SEQ ID NO: 17 and 67 of WO2016065001), AAV CLv-K1 (SEQ ID NO: 18 and 68 of WO2016065001), AAV CLv-K3 (SEQ ID NO: 19 and 69 of WO2016065001), AAV CLv-K6 (SEQ ID NO: 20 and 70 of WO2016065001), AAV CLv-M1 (SEQ ID NO: 21 and 71 of WO2016065001), AAV CLv-M11 (SEQ ID NO: 22 and 72 of WO2016065001), AAV CLv-M2 (SEQ ID NO: 23 and 73 of WO2016065001), AAV CLv-M5 (SEQ ID NO: 24 and 74 of WO2016065001), AAV CLv-M6 (SEQ ID NO: 25 and 75 of WO2016065001), AAV CLv-M7 (SEQ ID NO: 26 and 76 of WO2016065001), AAV CLv-M8 (SEQ ID NO: 27 and 77 of WO2016065001), AAV CLv-M9 (SEQ ID NO: 28 and 78 of WO2016065001), AAV CHt-P1 (SEQ ID NO: 29 and 79 of WO2016065001), AAV CHt-P6 (SEQ ID NO: 30 and 80 of WO2016065001), AAV CHt-P8 (SEQ ID NO: 31 and 81 of WO2016065001), AAV CHt-6.1 (SEQ ID NO: 32 and 82 of WO2016065001), AAV CHt-6.10 (SEQ ID NO: 33 and 83 of WO2016065001), AAV CHt-6.5 (SEQ ID NO: 34 and 84 of WO2016065001), AAV CHt-6.6 (SEQ ID NO: 35 and 85 of WO2016065001), AAV CHt-6.7 (SEQ ID NO: 36 and 86 of WO2016065001), AAV CHt-6.8 (SEQ ID NO: 37 and 87 of WO2016065001), AAV CSp-8.10 (SEQ ID NO: 38 and 88 of WO2016065001), AAV CSp-8.2 (SEQ ID NO: 39 and 89 of WO2016065001), AAV CSp-8.4 (SEQ ID NO: 40 and 90 of WO2016065001), AAV CSp-8.5 (SEQ ID NO: 41 and 91 of WO2016065001), AAV CSp-8.6 (SEQ ID NO: 42 and 92 of WO2016065001), AAV CSp-8.7 (SEQ ID NO: 43 and 93 of WO2016065001), AAV CSp-8.8 (SEQ ID NO: 44 and 94 of WO2016065001), AAV CSp-8.9 (SEQ ID NO: 45 and 95 of WO2016065001), AAV CBr-B7.3 (SEQ ID NO: 46 and 96 of WO2016065001), AAV CBr-B7.4 (SEQ ID NO: 47 and 97 of WO2016065001), AAV3B (SEQ ID NO: 48 and 98 of WO2016065001), AAV4 (SEQ ID NO: 49 and 99 of WO2016065001), AAV5 (SEQ ID NO: 50 and 100 of WO2016065001), or variants or derivatives thereof.

[0319] In one embodiment, the AAV may be a serotype comprising at least one AAV capsid CD8+ T-cell epitope. As a non-limiting example, the serotype may be AAV1, AAV2 or AAV8.

[0320] In one embodiment, the AAV may be a serotype selected from any of those found in Table 11.

[0321] In one embodiment, the AAV may comprise a sequence, fragment or variant thereof, of the sequences in Table 11.

[0322] In one embodiment, the AAV may be encoded by a sequence, fragment or variant as described in Table 11.

TABLE 11
AAV Serotypes

| | SEQ ID | |
|---|---|---|
| Serotype | NO | Reference Information |
| AAV1 | 369 | US20150159173 SEQ ID NO: 11, US20150315612 SEQ ID NO: 202 |
| AAV1 | 370 | US20160017295 SEQ ID NO: 1US20030138772 SEQ ID NO: 64, |
| | | US20150159173 SEQ ID NO: 27, US20150315612 SEQ ID NO: 219, |
| | | U.S. Pat. No. 7,198,951 SEQ ID NO: 5 |
| AAV1 | 371 | US20030138772 SEQ ID NO: 6 |
| AAV1.3 | 372 | US20030138772 SEQ ID NO: 14 |
| AAV10 | 373 | US20030138772 SEQ ID NO: 117 |
| AAV10 | 374 | WO2015121501 SEQ ID NO: 9 |
| AAV10 | 375 | WO2015121501 SEQ ID NO: 8 |
| AAV11 | 376 | US20030138772 SEQ ID NO: 118 |
| AAV12 | 377 | US20030138772 SEQ ID NO: 119 |
| AAV2 | 378 | US20150159173 SEQ ID NO: 7, US20150315612 SEQ ID NO: 211 |
| AAV2 | 379 | US20030138772 SEQ ID NO: 70, US20150159173 SEQ ID NO: 23, |
| | | US20150315612 SEQ ID NO: 221, US20160017295 SEQ ID NO: 2, |
| | | U.S. Pat. No. 6,156,303 SEQ ID NO: 4, U.S. Pat. No. 7,198,951 SEQ ID NO: 4, |
| | | WO2015121501 SEQ ID NO: 1 |
| AAV2 | 380 | U.S. Pat. No. 6,156,303 SEQ ID NO: 8 |
| AAV2 | 381 | US20030138772 SEQ ID NO: 7 |
| AAV2 | 382 | U.S. Pat. No. 6,156,303 SEQ ID NO: 3 |
| AAV2.5T | 383 | U.S. Pat. No. 9,233,131 SEQ ID NO: 42 |
| AAV223.10 | 384 | US20030138772 SEQ ID NO: 75 |
| AAV223.2 | 385 | US20030138772 SEQ ID NO: 49 |
| AAV223.2 | 386 | US20030138772 SEQ ID NO: 76 |
| AAV223.4 | 387 | US20030138772 SEQ ID NO: 50 |
| AAV223.4 | 388 | US20030138772 SEQ ID NO: 73 |
| AAV223.5 | 389 | US20030138772 SEQ ID NO: 51 |
| AAV223.5 | 390 | US20030138772 SEQ ID NO: 74 |
| AAV223.6 | 391 | US20030138772 SEQ ID NO: 52 |
| AAV223.6 | 392 | US20030138772 SEQ ID NO: 78 |
| AAV223.7 | 393 | US20030138772 SEQ ID NO: 53 |
| AAV223.7 | 394 | US20030138772 SEQ ID NO: 77 |
| AAV29.3 | 395 | US20030138772 SEQ ID NO: 82 |
| AAV29.4 | 396 | US20030138772 SEQ ID NO: 12 |
| AAV29.5 | 397 | US20030138772 SEQ ID NO: 83 |
| AAV29.5 (AAVbb.2) | 398 | US20030138772 SEQ ID NO: 13 |
| AAV3 | 399 | US20150159173 SEQ ID NO: 12 |
| AAV3 | 400 | US20030138772 SEQ ID NO: 71, US20150159173 SEQ ID NO: 28, |
| | | US20160017295 SEQ ID NO: 3, U.S. Pat. No. 7,198,951 SEQ ID NO: 6 |
| AAV3 | 401 | US20030138772 SEQ ID NO: 8 |
| AAV3.3b | 402 | US20030138772 SEQ ID NO: 72 |
| AAV3-3 | 403 | US20150315612 SEQ ID NO: 200 |
| AAV3-3 | 404 | US20150315612 SEQ ID NO: 217 |
| AAV3a | 405 | U.S. Pat. No. 6,156,303 SEQ ID NO: 5 |
| AAV3a | 406 | U.S. Pat. No. 6,156,303 SEQ ID NO: 9 |
| AAV3b | 407 | U.S. Pat. No. 6,156,303 SEQ ID NO: 6 |
| AAV3b | 408 | U.S. Pat. No. 6,156,303 SEQ ID NO: 10 |
| AAV3b | 409 | U.S. Pat. No. 6,156,303 SEQ ID NO: 1 |
| AAV4 | 410 | US20140348794 SEQ ID NO: 17 |
| AAV4 | 411 | US20140348794 SEQ ID NO: 5 |
| AAV4 | 412 | US20140348794 SEQ ID NO: 3 |
| AAV4 | 413 | US20140348794 SEQ ID NO: 14 |
| AAV4 | 414 | US20140348794 SEQ ID NO: 15 |
| AAV4 | 415 | US20140348794 SEQ ID NO: 19 |
| AAV4 | 416 | US20140348794 SEQ ID NO: 12 |
| AAV4 | 417 | US20140348794 SEQ ID NO: 13 |
| AAV4 | 418 | US20140348794 SEQ ID NO: 7 |
| AAV4 | 419 | US20140348794 SEQ ID NO: 8 |
| AAV4 | 420 | US20140348794 SEQ ID NO: 9 |
| AAV4 | 421 | US20140348794 SEQ ID NO: 2 |
| AAV4 | 422 | US20140348794 SEQ ID NO: 10 |
| AAV4 | 423 | US20140348794 SEQ ID NO: 11 |
| AAV4 | 424 | US20140348794 SEQ ID NO: 18 |
| AAV4 | 425 | US20030138772 SEQ ID NO: 63, US20160017295 SEQ ID NO: 4, |
| | | US20140348794 SEQ ID NO: 4 |
| AAV4 | 426 | US20140348794 SEQ ID NO: 16 |
| AAV4 | 427 | US20140348794 SEQ ID NO: 20 |
| AAV4 | 428 | US20140348794 SEQ ID NO: 6 |
| AAV4 | 429 | US20140348794 SEQ ID NO: 1 |
| AAV42.2 | 430 | US20030138772 SEQ ID NO: 9 |
| AAV42.2 | 431 | US20030138772 SEQ ID NO: 102 |
| AAV42.3b | 432 | US20030138772 SEQ ID NO: 36 |
| AAV42.3B | 433 | US20030138772 SEQ ID NO: 107 |
| AAV42.4 | 434 | US20030138772 SEQ ID NO: 33 |
| AAV42.4 | 435 | US20030138772 SEQ ID NO: 88 |
| AAV42.8 | 436 | US20030138772 SEQ ID NO: 27 |
| AAV42.8 | 437 | US20030138772 SEQ ID NO: 85 |
| AAV43.1 | 438 | US20030138772 SEQ ID NO: 39 |
| AAV43.1 | 439 | US20030138772 SEQ ID NO: 92 |
| AAV43.12 | 440 | US20030138772 SEQ ID NO: 41 |
| AAV43.12 | 441 | US20030138772 SEQ ID NO: 93 |
| AAV43.20 | 442 | US20030138772 SEQ ID NO: 42 |
| AAV43.20 | 443 | US20030138772 SEQ ID NO: 99 |
| AAV43.21 | 444 | US20030138772 SEQ ID NO: 43 |
| AAV43.21 | 445 | US20030138772 SEQ ID NO: 96 |
| AAV43.23 | 446 | US20030138772 SEQ ID NO: 44 |
| AAV43.23 | 447 | US20030138772 SEQ ID NO: 98 |
| AAV43.25 | 448 | US20030138772 SEQ ID NO: 45 |
| AAV43.25 | 449 | US20030138772 SEQ ID NO: 97 |
| AAV43.5 | 450 | US20030138772 SEQ ID NO: 40 |
| AAV43.5 | 451 | US20030138772 SEQ ID NO: 94 |
| AAV4-4 | 452 | US20150315612 SEQ ID NO: 201 |
| AAV4-4 | 453 | US20150315612 SEQ ID NO: 218 |
| AAV44.1 | 454 | US20030138772 SEQ ID NO: 46 |
| AAV44.1 | 455 | US20030138772 SEQ ID NO: 79 |
| AAV44.5 | 456 | US20030138772 SEQ ID NO: 47 |
| AAV44.5 | 457 | US20030138772 SEQ ID NO: 80 |
| AAV4407 | 458 | US20150315612 SEQ ID NO: 90 |
| AAV5 | 459 | U.S. Pat. No. 7,427,396 SEQ ID NO: 1 |
| AAV5 | 460 | US20030138772 SEQ ID NO: 114 |
| AAV5 | 461 | US20160017295 SEQ ID NO: 5, U.S. Pat. No. 7,427,396 SEQ ID NO: 2, |
| | | US20150315612 SEQ ID NO: 216 |
| AAV5 | 462 | US20150315612 SEQ ID NO: 199 |
| AAV6 | 463 | US20150159173 SEQ ID NO: 13 |
| AAV6 | 464 | US20030138772 SEQ ID NO: 65, US20150159173 SEQ ID NO: 29, |
| | | US20160017295 SEQ ID NO: 6, U.S. Pat. No. 6,156,303 SEQ ID NO: 7 |
| AAV6 | 465 | U.S. Pat. No. 6,156,303 SEQ ID NO: 11 |
| AAV6 | 466 | U.S. Pat. No. 6,156,303 SEQ ID NO: 2 |
| AAV6 | 467 | US20150315612 SEQ ID NO: 203 |
| AAV6 | 468 | US20150315612 SEQ ID NO: 220 |
| AAV6.1 | 469 | US20150159173 |
| AAV6.12 | 470 | US20150159173 |
| AAV6.2 | 471 | US20150159173 |
| AAV7 | 472 | US20150159173 SEQ ID NO: 14 |
| AAV7 | 473 | US20150315612 SEQ ID NO: 183 |
| AAV7 | 474 | US20030138772 SEQ ID NO: 2, US20150159173 SEQ ID NO: 30, |
| | | US20150315612 SEQ ID NO: 181, US20160017295 SEQ ID NO: 7 |
| AAV7 | 475 | US20030138772 SEQ ID NO: 3 |
| AAV7 | 476 | US20030138772 SEQ ID NO: 1, US20150315612 SEQ ID NO: 180 |
| AAV7 | 477 | US20150315612 SEQ ID NO: 213 |
| AAV7 | 478 | US20150315612 SEQ ID NO: 222 |
| AAV8 | 479 | US20150159173 SEQ ID NO: 15 |
| AAV8 | 480 | US20150376240 SEQ ID NO: 7 |
| AAV8 | 481 | US20030138772 SEQ ID NO: 4, US20150315612 SEQ ID NO: 182 |
| AAV8 | 482 | US20030138772 SEQ ID NO: 95, US20140359799 SEQ ID NO: 1, |
| | | US20150159173 SEQ ID NO: 31, US20160017295 SEQ ID NO: 8, |
| | | U.S. Pat. No. 7,198,951 SEQ ID NO: 7, US20150315612 SEQ ID NO: 223 |
| AAV8 | 483 | US20150376240 SEQ ID NO: 8 |
| AAV8 | 484 | US20150315612 SEQ ID NO: 214 |
| AAV-8b | 485 | US20150376240 SEQ ID NO: 5 |
| AAV-8b | 486 | US20150376240 SEQ ID NO: 3 |
| AAV-8h | 487 | US20150376240 SEQ ID NO: 6 |
| AAV-8h | 488 | US20150376240 SEQ ID NO: 4 |
| AAV9 | 489 | US20030138772 SEQ ID NO: 5 |
| AAV9 | 490 | U.S. Pat. No. 7,198,951 SEQ ID NO: 1 |
| AAV9 | 491 | US20160017295 SEQ ID NO: 9 |
| AAV9 | 492 | US20030138772 SEQ ID NO: 100, U.S. Pat. No. 7,198,951 SEQ ID NO: 2 |
| AAV9 | 493 | U.S. Pat. No. 7,198,951 SEQ ID NO: 3 |
| AAV9 (AAVhu.14) | 494 | U.S. Pat. No. 7,906,111 SEQ ID NO: 3; WO2015038958 SEQ ID NO: 11 |
| AAV9 (AAVhu.14) | 495 | U.S. Pat. No. 7,906,111 SEQ ID NO: 123; WO2015038958 SEQ ID NO: 2 |
| AAVA3.1 | 496 | US20030138772 SEQ ID NO: 120 |
| AAVA3.3 | 497 | US20030138772 SEQ ID NO: 57 |
| AAVA3.3 | 498 | US20030138772 SEQ ID NO: 66 |
| AAVA3.4 | 499 | US20030138772 SEQ ID NO: 54 |
| AAVA3.4 | 500 | US20030138772 SEQ ID NO: 68 |
| AAVA3.5 | 501 | US20030138772 SEQ ID NO: 55 |
| AAVA3.5 | 502 | US20030138772 SEQ ID NO: 69 |
| AAVA3.7 | 503 | US20030138772 SEQ ID NO: 56 |
| AAVA3.7 | 504 | US20030138772 SEQ ID NO: 67 |
| AAV29.3 (AAVbb.1) | 505 | US20030138772 SEQ ID NO: 11 |
| AAVC2 | 506 | US20030138772 SEQ ID NO: 61 |
| AAVCh.5 | 507 | US20150159173 SEQ ID NO: 46, US20150315612 SEQ ID NO: 234 |
| AAVcy.2 (AAV13.3) | 508 | US20030138772 SEQ ID NO: 15 |
| AAV24.1 | 509 | US20030138772 SEQ ID NO: 101 |
| AAVcy.3 (AAV24.1) | 510 | US20030138772 SEQ ID NO: 16 |
| AAV27.3 | 511 | US20030138772 SEQ ID NO: 104 |
| AAVcy.4 (AAV27.3) | 512 | US20030138772 SEQ ID NO: 17 |
| AAVcy.5 | 513 | US20150315612 SEQ ID NO: 227 |
| AAV7.2 | 514 | US20030138772 SEQ ID NO: 103 |
| AAVcy.5 (AAV7.2) | 515 | US20030138772 SEQ ID NO: 18 |
| AAV16.3 | 516 | US20030138772 SEQ ID NO: 105 |
| AAVcy.6 (AAV16.3) | 517 | US20030138772 SEQ ID NO: 10 |
| AAVcy.5 | 518 | US20150159173 SEQ ID NO: 8 |
| AAVcy.5 | 519 | US20150159173 SEQ ID NO: 24 |
| AAVCy.5R1 | 520 | US20150159173 |
| AAVCy.5R2 | 521 | US20150159173 |
| AAVCy.5R3 | 522 | US20150159173 |
| AAVCy.5R4 | 523 | US20150159173 |
| AAVDJ | 524 | US20140359799 SEQ ID NO: 3, U.S. Pat. No. 7,588,772 SEQ ID NO: 2 |
| AAVDJ | 525 | US20140359799 SEQ ID NO: 2, U.S. Pat. No. 7,588,772 SEQ ID NO: 1 |
| AAVDJ-8 | 526 | U.S. Pat. No. 7,588,772; Grimm et al 2008 |
| AAVDJ-8 | 527 | U.S. Pat. No. 7,588,772; Grimm et al 2008 |
| AAVF5 | 528 | US20030138772 SEQ ID NO: 110 |
| AAVH2 | 529 | US20030138772 SEQ ID NO: 26 |
| AAVH6 | 530 | US20030138772 SEQ ID NO: 25 |
| AAVhE1.1 | 531 | U.S. Pat. No. 9,233,131 SEQ ID NO: 44 |
| AAVhEr1.14 | 532 | U.S. Pat. No. 9,233,131 SEQ ID NO: 46 |
| AAVhEr1.16 | 533 | U.S. Pat. No. 9,233,131 SEQ ID NO: 48 |
| AAVhEr1.18 | 534 | U.S. Pat. No. 9,233,131 SEQ ID NO: 49 |
| AAVhEr1.23 | 535 | U.S. Pat. No. 9,233,131 SEQ ID NO: 53 |
| (AAVhEr2.29) | | |
| AAVhEr1.35 | 536 | U.S. Pat. No. 9,233,131 SEQ ID NO: 50 |
| AAVhEr1.36 | 537 | U.S. Pat. No. 9,233,131 SEQ ID NO: 52 |
| AAVhEr1.5 | 538 | U.S. Pat. No. 9,233,131 SEQ ID NO: 45 |
| AAVhEr1.7 | 539 | U.S. Pat. No. 9,233,131 SEQ ID NO: 51 |
| AAVhEr1.8 | 540 | U.S. Pat. No. 9,233,131 SEQ ID NO: 47 |
| AAVhEr2.16 | 541 | U.S. Pat. No. 9,233,131 SEQ ID NO: 55 |
| AAVhEr2.30 | 542 | U.S. Pat. No. 9,233,131 SEQ ID NO: 56 |
| AAVhEr2.31 | 543 | U.S. Pat. No. 9,233,131 SEQ ID NO: 58 |
| AAVhEr2.36 | 544 | U.S. Pat. No. 9,233,131 SEQ ID NO: 57 |
| AAVhEr2.4 | 545 | U.S. Pat. No. 9,233,131 SEQ ID NO: 54 |
| AAVhEr3.1 | 546 | U.S. Pat. No. 9,233,131 SEQ ID NO: 59 |
| AAVhu.1 | 547 | US20150315612 SEQ ID NO: 46 |
| AAVhu.1 | 548 | US20150315612 SEQ ID NO: 144 |
| AAVhu.10 | 549 | US20150315612 SEQ ID NO: 56 |
| (AAV16.8) | | |
| AAVhu.10 | 550 | US20150315612 SEQ ID NO: 156 |
| (AAV16.8) | | |
| AAVhu.11 | 551 | US20150315612 SEQ ID NO: 57 |
| (AAV16.12) | | |
| AAVhu.11 | 552 | US20150315612 SEQ ID NO: 153 |
| (AAV16.12) | | |
| AAVhu.12 | 553 | US20150315612 SEQ ID NO: 59 |
| AAVhu.12 | 554 | US20150315612 SEQ ID NO: 154 |
| AAVhu.13 | 555 | US20150159173 SEQ ID NO: 16, US20150315612 SEQ ID NO: 71 |
| AAVhu.13 | 556 | US20150159173 SEQ ID NO: 32, US20150315612 SEQ ID NO: 129 |
| AAVhu.136.1 | 557 | US20150315612 SEQ ID NO: 165 |
| AAVhu.140.1 | 558 | US20150315612 SEQ ID NO: 166 |
| AAVhu.140.2 | 559 | US20150315612 SEQ ID NO: 167 |
| AAVhu.145.6 | 560 | US20150315612 SEQ ID No: 178 |
| AAVhu.15 | 561 | US20150315612 SEQ ID NO: 147 |
| AAVhu.15 | 562 | US20150315612 SEQ ID NO: 50 |
| (AAV33.4) | | |
| AAVhu.156.1 | 563 | US20150315612 SEQ ID No: 179 |
| AAVhu.16 | 564 | US20150315612 SEQ ID NO: 148 |
| AAVhu.16 | 565 | US20150315612 SEQ ID NO: 51 |
| (AAV33.8) | | |
| AAVhu.17 | 566 | US20150315612 SEQ ID NO: 83 |
| AAVhu.17 | 567 | US20150315612 SEQ ID NO: 4 |
| (AAV33.12) | | |
| AAVhu.172.1 | 568 | US20150315612 SEQ ID NO: 171 |
| AAVhu.172.2 | 569 | US20150315612 SEQ ID NO: 172 |
| AAVhu.173.4 | 570 | US20150315612 SEQ ID NO: 173 |
| AAVhu.173.8 | 571 | US20150315612 SEQ ID NO: 175 |
| AAVhu.18 | 572 | US20150315612 SEQ ID NO: 52 |
| AAVhu.18 | 573 | US20150315612 SEQ ID NO: 149 |
| AAVhu.19 | 574 | US20150315612 SEQ ID NO: 62 |
| AAVhu.19 | 575 | US20150315612 SEQ ID NO: 133 |
| AAVhu.2 | 576 | US20150315612 SEQ ID NO: 48 |
| AAVhu.2 | 577 | US20150315612 SEQ ID NO: 143 |
| AAVhu.20 | 578 | US20150315612 SEQ ID NO: 63 |
| AAVhu.20 | 579 | US20150315612 SEQ ID NO: 134 |
| AAVhu.21 | 580 | US20150315612 SEQ ID NO: 65 |
| AAVhu.21 | 581 | US20150315612 SEQ ID NO: 135 |
| AAVhu.22 | 582 | US20150315612 SEQ ID NO: 67 |
| AAVhu.22 | 583 | US20150315612 SEQ ID NO: 138 |
| AAVhu.23 | 584 | US20150315612 SEQ ID NO: 60 |
| AAVhu.23.2 | 585 | US20150315612 SEQ ID NO: 137 |
| AAVhu.24 | 586 | US20150315612 SEQ ID NO: 66 |
| AAVhu.24 | 587 | US20150315612 SEQ ID NO: 136 |
| AAVhu.25 | 588 | US20150315612 SEQ ID NO: 49 |
| AAVhu.25 | 589 | US20150315612 SEQ ID NO: 146 |
| AAVhu.26 | 590 | US20150159173 SEQ ID NO: 17, US20150315612 SEQ ID NO: 61 |
| AAVhu.26 | 591 | US20150159173 SEQ ID NO: 33, US20150315612 SEQ ID NO: 139 |
| AAVhu.27 | 592 | US20150315612 SEQ ID NO: 64 |
| AAVhu.27 | 593 | US20150315612 SEQ ID NO: 140 |
| AAVhu.28 | 594 | US20150315612 SEQ ID NO: 68 |
| AAVhu.28 | 595 | US20150315612 SEQ ID NO: 130 |
| AAVhu.29 | 596 | US20150315612 SEQ ID NO: 69 |
| AAVhu.29 | 597 | US20150159173 SEQ ID NO: 42, US20150315612 SEQ ID NO: 132 |
| AAVhu.29 | 598 | US20150315612 SEQ ID NO: 225 |
| AAVhu.29R | 599 | US20150159173 |
| AAVhu.3 | 600 | US20150315612 SEQ ID NO: 44 |
| AAVhu.3 | 601 | US20150315612 SEQ ID NO: 145 |
| AAVhu.30 | 602 | US20150315612 SEQ ID NO: 70 |
| AAVhu.30 | 603 | US20150315612 SEQ ID NO: 131 |
| AAVhu.31 | 604 | US20150315612 SEQ ID NO: 1 |
| AAVhu.31 | 605 | US20150315612 SEQ ID NO: 121 |
| AAVhu.32 | 606 | US20150315612 SEQ ID NO: 2 |
| AAVhu.32 | 607 | US20150315612 SEQ ID NO: 122 |
| AAVhu.33 | 608 | US20150315612 SEQ ID NO: 75 |
| AAVhu.33 | 609 | US20150315612 SEQ ID NO: 124 |
| AAVhu.34 | 610 | US20150315612 SEQ ID NO: 72 |
| AAVhu.34 | 611 | US20150315612 SEQ ID NO: 125 |
| AAVhu.35 | 612 | US20150315612 SEQ ID NO: 73 |
| AAVhu.35 | 613 | US20150315612 SEQ ID NO: 164 |
| AAVhu.36 | 614 | US20150315612 SEQ ID NO: 74 |
| AAVhu.36 | 615 | US20150315612 SEQ ID NO: 126 |
| AAVhu.37 | 616 | US20150159173 SEQ ID NO: 34, US20150315612 SEQ ID NO: 88 |
| AAVhu.37 | 617 | US20150315612 SEQ ID NO: 10, US20150159173 SEQ ID NO: 18 |
| (AAV106.1) | | |
| AAVhu.38 | 618 | US20150315612 SEQ ID NO: 161 |
| AAVhu.39 | 619 | US20150315612 SEQ ID NO: 102 |
| AAVhu.39 | 620 | US20150315612 SEQ ID NO: 24 |
| (AAVLG-9) | | |
| AAVhu.4 | 621 | US20150315612 SEQ ID NO: 47 |
| AAVhu.4 | 622 | US20150315612 SEQ ID NO: 141 |
| AAVhu.40 | 623 | US20150315612 SEQ ID NO: 87 |
| AAVhu.40 | 624 | US20150315612 SEQ ID No: 11 |
| (AAV114.3) | | |
| AAVhu.41 | 625 | US20150315612 SEQ ID NO: 91 |
| AAVhu.41 | 626 | US20150315612 SEQ ID NO: 6 |
| (AAV127.2) | | |
| AAVhu.42 | 627 | US20150315612 SEQ ID NO: 85 |
| AAVhu.42 | 628 | US20150315612 SEQ ID NO: 8 |
| (AAV127.5) | | |
| AAVhu.43 | 629 | US20150315612 SEQ ID NO: 160 |
| AAVhu.43 | 630 | US20150315612 SEQ ID NO: 236 |
| AAVhu.43 | 631 | US20150315612 SEQ ID NO: 80 |
| (AAV128.1) | | |
| AAVhu.44 | 632 | US20150159173 SEQ ID NO: 45, US20150315612 SEQ ID NO: 158 |
| AAVhu.44 | 633 | US20150315612 SEQ ID NO: 81 |
| (AAV128.3) | | |
| AAVhu.44R1 | 634 | US20150159173 |
| AAVhu.44R2 | 635 | US20150159173 |
| AAVhu.44R3 | 636 | US20150159173 |
| AAVhu.45 | 637 | US20150315612 SEQ ID NO: 76 |
| AAVhu.45 | 638 | US20150315612 SEQ ID NO: 127 |
| AAVhu.46 | 639 | US20150315612 SEQ ID NO: 82 |
| AAVhu.46 | 640 | US20150315612 SEQ ID NO: 159 |
| AAVhu.46 | 641 | US20150315612 SEQ ID NO: 224 |
| AAVhu.47 | 642 | US20150315612 SEQ ID NO: 77 |
| AAVhu.47 | 643 | US20150315612 SEQ ID NO: 128 |
| AAVhu.48 | 644 | US20150159173 SEQ ID NO: 38 |
| AAVhu.48 | 645 | US20150315612 SEQ ID NO: 157 |
| AAVhu.48 | 646 | US20150315612 SEQ ID NO: 78 |
| (AAV130.4) | | |
| AAVhu.48R1 | 647 | US20150159173 |
| AAVhu.48R2 | 648 | US20150159173 |
| AAVhu.48R3 | 649 | US20150159173 |
| AAVhu.49 | 650 | US20150315612 SEQ ID NO: 209 |
| AAVhu.49 | 651 | US20150315612 SEQ ID NO: 189 |
| AAVhu.5 | 652 | US20150315612 SEQ ID NO: 45 |
| AAVhu.5 | 653 | US20150315612 SEQ ID NO: 142 |
| AAVhu.51 | 654 | US20150315612 SEQ ID NO: 208 |
| AAVhu.51 | 655 | US20150315612 SEQ ID NO: 190 |
| AAVhu.52 | 656 | US20150315612 SEQ ID NO: 210 |
| AAVhu.52 | 657 | US20150315612 SEQ ID NO: 191 |
| AAVhu.53 | 658 | US20150159173 SEQ ID NO: 19 |
| AAVhu.53 | 659 | US20150159173 SEQ ID NO: 35 |
| AAVhu.53 | 660 | US20150315612 SEQ ID NO: 176 |
| (AAV145.1) | | |
| AAVhu.54 | 661 | US20150315612 SEQ ID NO: 188 |
| AAVhu.54 | 662 | US20150315612 SEQ ID No: 177 |
| (AAV145.5) | | |
| AAVhu.55 | 663 | US20150315612 SEQ ID NO: 187 |
| AAVhu.56 | 664 | US20150315612 SEQ ID NO: 205 |
| AAVhu.56 | 665 | US20150315612 SEQ ID NO: 168 |
| (AAV145.6) | | |
| AAVhu.56 | 666 | US20150315612 SEQ ID NO: 192 |
| (AAV145.6) | | |
| AAVhu.57 | 667 | US20150315612 SEQ ID NO: 206 |
| AAVhu.57 | 668 | US20150315612 SEQ ID NO: 169 |
| AAVhu.57 | 669 | US20150315612 SEQ ID NO: 193 |
| AAVhu.58 | 670 | US20150315612 SEQ ID NO: 207 |
| AAVhu.58 | 671 | US20150315612 SEQ ID NO: 194 |
| AAVhu.6 (AAV3.1) | 672 | US20150315612 SEQ ID NO: 5 |
| AAVhu.6 (AAV3.1) | 673 | US20150315612 SEQ ID NO: 84 |
| AAVhu.60 | 674 | US20150315612 SEQ ID NO: 184 |
| AAVhu.60 | 675 | US20150315612 SEQ ID NO: 170 |
| (AAV161.10) | | |
| AAVhu.61 | 676 | US20150315612 SEQ ID NO: 185 |
| AAVhu.61 | 677 | US20150315612 SEQ ID NO: 174 |
| (AAV161.6) | | |
| AAVhu.63 | 678 | US20150315612 SEQ ID NO: 204 |
| AAVhu.63 | 679 | US20150315612 SEQ ID NO: 195 |
| AAVhu.64 | 680 | US20150315612 SEQ ID NO: 212 |
| AAVhu.64 | 681 | US20150315612 SEQ ID NO: 196 |
| AAVhu.66 | 682 | US20150315612 SEQ ID NO: 197 |
| AAVhu.67 | 683 | US20150315612 SEQ ID NO: 215 |
| AAVhu.67 | 684 | US20150315612 SEQ ID NO: 198 |
| AAVhu.7 | 685 | US20150315612 SEQ ID NO: 226 |
| AAVhu.7 | 686 | US20150315612 SEQ ID NO: 150 |
| AAVhu.7 (AAV7.3) | 687 | US20150315612 SEQ ID NO: 55 |
| AAVhu.71 | 688 | US20150315612 SEQ ID NO: 79 |
| AAVhu.8 | 689 | US20150315612 SEQ ID NO: 53 |
| AAVhu.8 | 690 | US20150315612 SEQ ID NO: 12 |
| AAVhu.8 | 691 | US20150315612 SEQ ID NO: 151 |
| AAVhu.9 (AAV3.1) | 692 | US20150315612 SEQ ID NO: 58 |
| AAVhu.9 (AAV3.1) | 693 | US20150315612 SEQ ID NO: 155 |
| AAV-LK01 | 694 | US20150376607 SEQ ID NO: 2 |
| AAV-LK01 | 695 | US20150376607 SEQ ID NO: 29 |
| AAV-LK02 | 696 | US20150376607 SEQ ID NO: 3 |
| AAV-LK02 | 697 | US20150376607 SEQ ID NO: 30 |
| AAV-LK03 | 698 | US20150376607 SEQ ID NO: 4 |
| AAV-LK03 | 699 | WO2015121501 SEQ ID NO: 12, US20150376607 SEQ ID NO: 31 |
| AAV-LK04 | 700 | US20150376607 SEQ ID NO: 5 |
| AAV-LK04 | 701 | US20150376607 SEQ ID NO: 32 |
| AAV-LK05 | 702 | US20150376607 SEQ ID NO: 6 |
| AAV-LK05 | 703 | US20150376607 SEQ ID NO: 33 |
| AAV-LK06 | 704 | US20150376607 SEQ ID NO: 7 |
| AAV-LK06 | 705 | US20150376607 SEQ ID NO: 34 |
| AAV-LK07 | 706 | US20150376607 SEQ ID NO: 8 |
| AAV-LK07 | 707 | US20150376607 SEQ ID NO: 35 |
| AAV-LK08 | 708 | US20150376607 SEQ ID NO: 9 |
| AAV-LK08 | 709 | US20150376607 SEQ ID NO: 36 |
| AAV-LK09 | 710 | US20150376607 SEQ ID NO: 10 |
| AAV-LK09 | 711 | US20150376607 SEQ ID NO: 37 |
| AAV-LK10 | 712 | US20150376607 SEQ ID NO: 11 |
| AAV-LK10 | 713 | US20150376607 SEQ ID NO: 38 |
| AAV-LK11 | 714 | US20150376607 SEQ ID NO: 12 |
| AAV-LK11 | 715 | US20150376607 SEQ ID NO: 39 |
| AAV-LK12 | 716 | US20150376607 SEQ ID NO: 13 |
| AAV-LK12 | 717 | US20150376607 SEQ ID NO: 40 |
| AAV-LK13 | 718 | US20150376607 SEQ ID NO: 14 |
| AAV-LK13 | 719 | US20150376607 SEQ ID NO: 41 |
| AAV-LK14 | 720 | US20150376607 SEQ ID NO: 15 |
| AAV-LK14 | 721 | US20150376607 SEQ ID NO: 42 |
| AAV-LK15 | 722 | US20150376607 SEQ ID NO: 16 |
| AAV-LK15 | 723 | US20150376607 SEQ ID NO: 43 |
| AAV-LK16 | 724 | US20150376607 SEQ ID NO: 17 |
| AAV-LK16 | 725 | US20150376607 SEQ ID NO: 44 |
| AAV-LK17 | 726 | US20150376607 SEQ ID NO: 18 |
| AAV-LK17 | 727 | US20150376607 SEQ ID NO: 45 |
| AAV-LK18 | 728 | US20150376607 SEQ ID NO: 19 |
| AAV-LK18 | 729 | US20150376607 SEQ ID NO: 46 |
| AAV-LK19 | 730 | US20150376607 SEQ ID NO: 20 |
| AAV-LK19 | 731 | US20150376607 SEQ ID NO: 47 |
| AAV-PAEC | 732 | US20150376607 SEQ ID NO: 1 |
| AAV-PAEC | 733 | US20150376607 SEQ ID NO: 48 |
| AAV-PAEC11 | 734 | US20150376607 SEQ ID NO: 26 |
| AAV-PAEC11 | 735 | US20150376607 SEQ ID NO: 54 |
| AAV-PAEC12 | 736 | US20150376607 SEQ ID NO: 27 |
| AAV-PAEC12 | 737 | US20150376607 SEQ ID NO: 51 |
| AAV-PAEC13 | 738 | US20150376607 SEQ ID NO: 28 |
| AAV-PAEC13 | 739 | US20150376607 SEQ ID NO: 49 |
| AAV-PAEC2 | 740 | US20150376607 SEQ ID NO: 21 |
| AAV-PAEC2 | 741 | US20150376607 SEQ ID NO: 56 |
| AAV-PAEC4 | 742 | US20150376607 SEQ ID NO: 22 |
| AAV-PAEC4 | 743 | US20150376607 SEQ ID NO: 55 |
| AAV-PAEC6 | 744 | US20150376607 SEQ ID NO: 23 |
| AAV-PAEC6 | 745 | US20150376607 SEQ ID NO: 52 |
| AAV-PAEC7 | 746 | US20150376607 SEQ ID NO: 24 |
| AAV-PAEC7 | 747 | US20150376607 SEQ ID NO: 53 |
| AAV-PAEC8 | 748 | US20150376607 SEQ ID NO: 25 |
| AAV-PAEC8 | 749 | US20150376607 SEQ ID NO: 50 |
| AAVpi.1 | 750 | US20150315612 SEQ ID NO: 28 |
| AAVpi.1 | 751 | US20150315612 SEQ ID NO: 93 |
| AAVpi.2 | 752 | US20150315612 SEQ ID NO: 30 |
| AAVpi.2 | 753 | US20150315612 SEQ ID NO: 95 |
| AAVpi.3 | 754 | US20150315612 SEQ ID NO: 29 |
| AAVpi.3 | 755 | US20150315612 SEQ ID NO: 94 |
| AAVrh.10 | 756 | US20150159173 SEQ ID NO: 9 |
| AAVrh.10 | 757 | US20150159173 SEQ ID NO: 25 |
| AAV44.2 | 758 | US20030138772 SEQ ID NO: 59 |
| AAVrh.10 | 759 | US20030138772 SEQ ID NO: 81 |
| (AAV44.2) | | |
| AAV42.1B | 760 | US20030138772 SEQ ID NO: 90 |
| AAVrh.12 | 761 | US20030138772 SEQ ID NO: 30 |
| (AAV42.1b) | | |
| AAVrh.13 | 762 | US20150159173 SEQ ID NO: 10 |
| AAVrh.13 | 763 | US20150159173 SEQ ID NO: 26 |
| AAVrh.13 | 764 | US20150315612 SEQ ID NO: 228 |
| AAVrh.13R | 765 | US20150159173 |
| AAV42.3A | 766 | US20030138772 SEQ ID NO: 87 |
| AAVrh.14 | 767 | US20030138772 SEQ ID NO: 32 |
| (AAV42.3a) | | |
| AAV42.5A | 768 | US20030138772 SEQ ID NO: 89 |
| AAVrh.17 | 769 | US20030138772 SEQ ID NO: 34 |
| (AAV42.5a) | | |
| AAV42.5B | 770 | US20030138772 SEQ ID NO: 91 |
| AAVrh.18 | 771 | US20030138772 SEQ ID NO: 29 |
| (AAV42.5b) | | |
| AAV42.6B | 772 | US20030138772 SEQ ID NO: 112 |
| AAVrh.19 | 773 | US20030138772 SEQ ID NO: 38 |
| (AAV42.6b) | | |
| AAVrh.2 | 774 | US20150159173 SEQ ID NO: 39 |
| AAVrh.2 | 775 | US20150315612 SEQ ID NO: 231 |
| AAVrh.20 | 776 | US20150159173 SEQ ID NO: 1 |
| AAV42.10 | 777 | US20030138772 SEQ ID NO: 106 |
| AAVrh.21 | 778 | US20030138772 SEQ ID NO: 35 |
| (AAV42.10) | | |
| AAV42.11 | 779 | US20030138772 SEQ ID NO: 108 |
| AAVrh.22 | 780 | US20030138772 SEQ ID NO: 37 |
| (AAV42.11) | | |
| AAV42.12 | 781 | US20030138772 SEQ ID NO: 113 |
| AAVrh.23 | 782 | US20030138772 SEQ ID NO: 58 |
| (AAV42.12) | | |
| AAV42.13 | 783 | US20030138772 SEQ ID NO: 86 |
| AAVrh.24 | 784 | US20030138772 SEQ ID NO: 31 |
| (AAV42.13) | | |
| AAV42.15 | 785 | US20030138772 SEQ ID NO: 84 |
| AAVrh.25 | 786 | US20030138772 SEQ ID NO: 28 |
| (AAV42.15) | | |
| AAVrh.2R | 787 | US20150159173 |
| AAVrh.31 | 788 | US20030138772 SEQ ID NO: 48 |
| (AAV223.1) | | |
| AAVC1 | 789 | US20030138772 SEQ ID NO: 60 |
| AAVrh.32 (AAVC1) | 790 | US20030138772 SEQ ID NO: 19 |
| AAVrh.32/33 | 791 | US20150159173 SEQ ID NO: 2 |
| AAVrh.33 (AAVC3) | 792 | US20030138772 SEQ ID NO: 20 |
| AAVC5 | 793 | US20030138772 SEQ ID NO: 62 |
| AAVrh.34 (AAVC5) | 794 | US20030138772 SEQ ID NO: 21 |
| AAVF1 | 795 | US20030138772 SEQ ID NO: 109 |
| AAVrh.35 (AAVF1) | 796 | US20030138772 SEQ ID NO: 22 |
| AAVF3 | 797 | US20030138772 SEQ ID NO: 111 |
| AAVrh.36 (AAVF3) | 798 | US20030138772 SEQ ID NO: 23 |
| AAVrh.37 | 799 | US20030138772 SEQ ID NO: 24 |
| AAVrh.37 | 800 | US20150159173 SEQ ID NO: 40 |
| AAVrh.37 | 801 | US20150315612 SEQ ID NO: 229 |
| AAVrh.37R2 | 802 | US20150159173 |
| AAVrh.38 | 803 | US20150315612 SEQ ID NO: 7 |
| (AAVLG-4) | | |
| AAVrh.38 | 804 | US20150315612 SEQ ID NO: 86 |
| (AAVLG-4) | | |
| AAVrh.39 | 805 | US20150159173 SEQ ID NO: 20, US20150315612 SEQ ID NO: 13 |
| AAVrh.39 | 806 | US20150159173 SEQ ID NO: 3, US20150159173 SEQ ID NO: 36, |
| | | US20150315612 SEQ ID NO: 89 |
| AAVrh.40 | 807 | US20150315612 SEQ ID NO: 92 |
| AAVrh.40 | 808 | US20150315612 SEQ ID No: 14 |
| (AAVLG-10) | | |
| AAVrh.43 | 809 | US20150315612 SEQ ID NO: 43, US20150159173 SEQ ID NO: 21 |
| (AAVN721-8) | | |
| AAVrh.43 | 810 | US20150315612 SEQ ID NO: 163, US20150159173 SEQ ID NO: 37 |
| (AAVN721-8) | | |
| AAVrh.44 | 811 | US20150315612 SEQ ID NO: 34 |
| AAVrh.44 | 812 | US20150315612 SEQ ID NO: 111 |
| AAVrh.45 | 813 | US20150315612 SEQ ID NO: 41 |
| AAVrh.45 | 814 | US20150315612 SEQ ID NO: 109 |
| AAVrh.46 | 815 | US20150159173 SEQ ID NO: 22, US20150315612 SEQ ID NO: 19 |
| AAVrh.46 | 816 | US20150159173 SEQ ID NO: 4, US20150315612 SEQ ID NO: 101 |
| AAVrh.47 | 817 | US20150315612 SEQ ID NO: 38 |
| AAVrh.47 | 818 | US20150315612 SEQ ID NO: 118 |
| AAVrh.48 | 819 | US20150159173 SEQ ID NO: 44, US20150315612 SEQ ID NO: 115 |
| AAVrh.48.1 | 820 | US20150159173 |
| AAVrh.48.1.2 | 821 | US20150159173 |
| AAVrh.48.2 | 822 | US20150159173 |
| AAVrh.48 (AAV1-7) | 823 | US20150315612 SEQ ID NO: 32 |
| AAVrh.49 (AAV1-8) | 824 | US20150315612 SEQ ID NO: 25 |
| AAVrh.49 (AAV1-8) | 825 | US20150315612 SEQ ID NO: 103 |
| AAVrh.50 (AAV2-4) | 826 | US20150315612 SEQ ID NO: 23 |
| AAVrh.50 (AAV2-4) | 827 | US20150315612 SEQ ID NO: 108 |
| AAVrh.51 (AAV2-5) | 828 | US20150315612 SEQ ID No: 22 |
| AAVrh.51 (AAV2-5) | 829 | US20150315612 SEQ ID NO: 104 |
| AAVrh.52 (AAV3-9) | 830 | US20150315612 SEQ ID NO: 18 |
| AAVrh.52 (AAV3-9) | 831 | US20150315612 SEQ ID NO: 96 |
| AAVrh.53 | 832 | US20150315612 SEQ ID NO: 97 |
| AAVrh.53 (AAV3-11) | 833 | US20150315612 SEQ ID NO: 17 |
| AAVrh.53 (AAV3-11) | 834 | US20150315612 SEQ ID NO: 186 |
| AAVrh.54 | 835 | US20150315612 SEQ ID NO: 40 |
| AAVrh.54 | 836 | US20150159173 SEQ ID NO: 49, US20150315612 SEQ ID NO: 116 |
| AAVrh.55 | 837 | US20150315612 SEQ ID NO: 37 |
| AAVrh.55 (AAV4-19) | 838 | US20150315612 SEQ ID NO: 117 |
| AAVrh.56 | 839 | US20150315612 SEQ ID NO: 54 |
| AAVrh.56 | 840 | US20150315612 SEQ ID NO: 152 |
| AAVrh.57 | 841 | US20150315612 SEQ ID NO: 26 |
| AAVrh.57 | 842 | US20150315612 SEQ ID NO: 105 |
| AAVrh.58 | 843 | US20150315612 SEQ ID NO: 27 |
| AAVrh.58 | 844 | US20150159173 SEQ ID NO: 48, US20150315612 SEQ ID NO: 106 |
| AAVrh.58 | 845 | US20150315612 SEQ ID NO: 232 |
| AAVrh.59 | 846 | US20150315612 SEQ ID NO: 42 |
| AAVrh.59 | 847 | US20150315612 SEQ ID NO: 110 |
| AAVrh.60 | 848 | US20150315612 SEQ ID NO: 31 |
| AAVrh.60 | 849 | US20150315612 SEQ ID NO: 120 |
| AAVrh.61 | 850 | US20150315612 SEQ ID NO: 107 |
| AAVrh.61 (AAV2-3) | 851 | US20150315612 SEQ ID NO: 21 |
| AAVrh.62 (AAV2-15) | 852 | US20150315612 SEQ ID No: 33 |
| AAVrh.62 (AAV2-15) | 853 | US20150315612 SEQ ID NO: 114 |
| AAVrh.64 | 854 | US20150315612 SEQ ID No: 15 |
| AAVrh.64 | 855 | US20150159173 SEQ ID NO: 43, US20150315612 SEQ ID NO: 99 |
| AAVrh.64 | 856 | US20150315612 SEQ ID NO: 233 |
| AAVRh.64R1 | 857 | US20150159173 |
| AAVRh.64R2 | 858 | US20150159173 |
| AAVrh.65 | 859 | US20150315612 SEQ ID NO: 35 |
| AAVrh.65 | 860 | US20150315612 SEQ ID NO: 112 |
| AAVrh.67 | 861 | US20150315612 SEQ ID NO: 36 |
| AAVrh.67 | 862 | US20150315612 SEQ ID NO: 230 |
| AAVrh.67 | 863 | US20150159173 SEQ ID NO: 47, US20150315612 SEQ ID NO: 113 |
| AAVrh.68 | 864 | US20150315612 SEQ ID NO: 16 |
| AAVrh.68 | 865 | US20150315612 SEQ ID NO: 100 |
| AAVrh.69 | 866 | US20150315612 SEQ ID NO: 39 |
| AAVrh.69 | 867 | US20150315612 SEQ ID NO: 119 |
| AAVrh.70 | 868 | US20150315612 SEQ ID NO: 20 |
| AAVrh.70 | 869 | US20150315612 SEQ ID NO: 98 |
| AAVrh.71 | 870 | US20150315612 SEQ ID NO: 162 |
| AAVrh.72 | 871 | US20150315612 SEQ ID NO: 9 |
| AAVrh.73 | 872 | US20150159173 SEQ ID NO: 5 |
| AAVrh.74 | 873 | US20150159173 SEQ ID NO: 6 |
| AAVrh.8 | 874 | US20150159173 SEQ ID NO: 41 |
| AAVrh.8 | 875 | US20150315612 SEQ ID NO: 235 |
| AAVrh.8R | 876 | US20150159173, WO2015168666 SEQ ID NO: 9 |
| AAVrh.8R A586R | 877 | WO2015168666 SEQ ID NO: 10 |
| mutant | | |
| AAVrh.8R R533A | 878 | WO2015168666 SEQ ID NO: 11 |
| mutant | | |
| BAAV (bovine AAV) | 879 | U.S. Pat. No. 9,193,769 SEQ ID NO: 8 |
| BAAV (bovine AAV) | 880 | U.S. Pat. No. 9,193,769 SEQ ID NO: 10 |
| BAAV (bovine AAV) | 881 | U.S. Pat. No. 9,193,769 SEQ ID NO: 4 |
| BAAV (bovine AAV) | 882 | U.S. Pat. No. 9,193,769 SEQ ID NO: 2 |
| BAAV (bovine AAV) | 883 | U.S. Pat. No. 9,193,769 SEQ ID NO: 6 |
| BAAV (bovine AAV) | 884 | U.S. Pat. No. 9,193,769 SEQ ID NO: 1 |
| BAAV (bovine AAV) | 885 | U.S. Pat. No. 9,193,769 SEQ ID NO: 5 |
| BAAV (bovine AAV) | 886 | U.S. Pat. No. 9,193,769 SEQ ID NO: 3 |
| BAAV (bovine AAV) | 887 | U.S. Pat. No. 9,193,769 SEQ ID NO: 11 |
| BAAV (bovine AAV) | 888 | U.S. Pat. No. 7,427,396 SEQ ID NO: 5 |
| BAAV (bovine AAV) | 889 | U.S. Pat. No. 7,427,396 SEQ ID NO: 6 |
| BAAV (bovine AAV) | 890 | U.S. Pat. No. 9,193,769 SEQ ID NO: 7 |
| BAAV (bovine AAV) | 891 | U.S. Pat. No. 9,193,769 SEQ ID NO: 9 |
| BNP61 AAV | 892 | US20150238550 SEQ ID NO: 1 |
| BNP61 AAV | 893 | US20150238550 SEQ ID NO: 2 |
| BNP62 AAV | 894 | US20150238550 SEQ ID NO: 3 |
| BNP63 AAV | 895 | US20150238550 SEQ ID NO: 4 |
| caprine AAV | 896 | U.S. Pat. No. 7,427,396 SEQ ID NO: 3 |
| caprine AAV | 897 | U.S. Pat. No. 7,427,396 SEQ ID NO: 4 |
| true type AAV | 898 | WO2015121501 SEQ ID NO: 2 |
| (ttAAV) | | |
| AAAV (Avian AAV) | 899 | U.S. Pat. No. 9,238,800 SEQ ID NO: 12 |
| AAAV (Avian AAV) | 900 | U.S. Pat. No. 9,238,800 SEQ ID NO: 2 |
| AAAV (Avian AAV) | 901 | U.S. Pat. No. 9,238,800 SEQ ID NO: 6 |
| AAAV (Avian AAV) | 902 | U.S. Pat. No. 9,238,800 SEQ ID NO: 4 |
| AAAV (Avian AAV) | 903 | U.S. Pat. No. 9,238,800 SEQ ID NO: 8 |
| AAAV (Avian AAV) | 904 | U.S. Pat. No. 9,238,800 SEQ ID NO: 14 |
| AAAV (Avian AAV) | 905 | U.S. Pat. No. 9,238,800 SEQ ID NO: 10 |
| AAAV (Avian AAV) | 906 | U.S. Pat. No. 9,238,800 SEQ ID NO: 15 |
| AAAV (Avian AAV) | 907 | U.S. Pat. No. 9,238,800 SEQ ID NO: 5 |
| AAAV (Avian AAV) | 908 | U.S. Pat. No. 9,238,800 SEQ ID NO: 9 |
| AAAV (Avian AAV) | 909 | U.S. Pat. No. 9,238,800 SEQ ID NO: 3 |
| AAAV (Avian AAV) | 910 | U.S. Pat. No. 9,238,800 SEQ ID NO: 7 |
| AAAV (Avian AAV) | 911 | U.S. Pat. No. 9,238,800 SEQ ID NO: 11 |
| AAAV (Avian AAV) | 912 | U.S. Pat. No. 9,238,800 SEQ ID NO: 13 |
| AAAV (Avian AAV) | 913 | U.S. Pat. No. 9,238,800 SEQ ID NO: 1 |
| AAV Shuffle 100-1 | 914 | US20160017295 SEQ ID NO: 23 |
| AAV Shuffle 100-1 | 915 | US20160017295 SEQ ID NO: 11 |
| AAV Shuffle 100-2 | 916 | US20160017295 SEQ ID NO: 37 |
| AAV Shuffle 100-2 | 917 | US20160017295 SEQ ID NO: 29 |
| AAV Shuffle 100-3 | 918 | US20160017295 SEQ ID NO: 24 |
| AAV Shuffle 100-3 | 919 | US20160017295 SEQ ID NO: 12 |
| AAV Shuffle 100-7 | 920 | US20160017295 SEQ ID NO: 25 |
| AAV Shuffle 100-7 | 921 | US20160017295 SEQ ID NO: 13 |
| AAV Shuffle 10-2 | 922 | US20160017295 SEQ ID NO: 34 |
| AAV Shuffle 10-2 | 923 | US20160017295 SEQ ID NO: 26 |
| AAV Shuffle 10-6 | 924 | US20160017295 SEQ ID NO: 35 |
| AAV Shuffle 10-6 | 925 | US20160017295 SEQ ID NO: 27 |
| AAV Shuffle 10-8 | 926 | US20160017295 SEQ ID NO: 36 |
| AAV Shuffle 10-8 | 927 | US20160017295 SEQ ID NO: 28 |
| AAV SM 100-10 | 928 | US20160017295 SEQ ID NO: 41 |
| AAV SM 100-10 | 929 | US20160017295 SEQ ID NO: 33 |
| AAV SM 100-3 | 930 | US20160017295 SEQ ID NO: 40 |
| AAV SM 100-3 | 931 | US20160017295 SEQ ID NO: 32 |
| AAV SM 10-1 | 932 | US20160017295 SEQ ID NO: 38 |
| AAV SM 10-1 | 933 | US20160017295 SEQ ID NO: 30 |
| AAV SM 10-2 | 934 | US20160017295 SEQ ID NO: 10 |
| AAV SM 10-2 | 935 | US20160017295 SEQ ID NO: 22 |
| AAV SM 10-8 | 936 | US20160017295 SEQ ID NO: 39 |
| AAV SM 10-8 | 937 | US20160017295 SEQ ID NO: 31 |
| AAV SM 100-10 | 928 | US20160017295 SEQ ID NO: 41 |
| AAV SM 100-10 | 929 | US20160017295 SEQ ID NO: 33 |
| AAV SM 100-3 | 930 | US20160017295 SEQ ID NO: 40 |
| AAV SM 100-3 | 931 | US20160017295 SEQ ID NO: 32 |
| AAV SM 10-1 | 932 | US20160017295 SEQ ID NO: 38 |
| AAV SM 10-1 | 933 | US20160017295 SEQ ID NO: 30 |
| AAV SM 10-2 | 934 | US20160017295 SEQ ID NO: 10 |
| AAV SM 10-2 | 935 | US20160017295 SEQ ID NO: 22 |
| AAV SM 10-8 | 936 | US20160017295 SEQ ID NO: 39 |
| AAV SM 10-8 | 937 | US20160017295 SEQ ID NO: 31 |
| AAVF1/HSC1 | 938 | WO2016049230 SEQ ID NO: 20 |
| AAVF2/HSC2 | 939 | WO2016049230 SEQ ID NO: 21 |
| AAVF3/HSC3 | 940 | WO2016049230 SEQ ID NO: 22 |
| AAVF4/HSC4 | 941 | WO2016049230 SEQ ID NO: 23 |
| AAVF5/HSC5 | 942 | WO2016049230 SEQ ID NO: 25 |
| AAVF6/HSC6 | 943 | WO2016049230 SEQ ID NO: 24 |
| AAVF7/HSC7 | 944 | WO2016049230 SEQ ID NO: 27 |
| AAVF8/HSC8 | 945 | WO2016049230 SEQ ID NO: 28 |
| AAVF9/HSC9 | 946 | WO2016049230 SEQ ID NO: 29 |
| AAVF11/HSC11 | 947 | WO2016049230 SEQ ID NO: 26 |
| AAVF12/HSC12 | 948 | WO2016049230 SEQ ID NO: 30 |
| AAVF13/HSC13 | 949 | WO2016049230 SEQ ID NO: 31 |
| AAVF14/HSC14 | 950 | WO2016049230 SEQ ID NO: 32 |
| AAVF15/HSC15 | 951 | WO2016049230 SEQ ID NO: 33 |
| AAVF16/HSC16 | 952 | WO2016049230 SEQ ID NO: 34 |
| AAVF17/HSC17 | 953 | WO2016049230 SEQ ID NO: 35 |
| AAVF1/HSC1 | 954 | WO2016049230 SEQ ID NO: 2 |
| AAVF2/HSC2 | 955 | WO2016049230 SEQ ID NO: 3 |
| AAVF3/HSC3 | 956 | WO2016049230 SEQ ID NO: 5 |
| AAVF4/HSC4 | 957 | WO2016049230 SEQ ID NO: 6 |
| AAVF5/HSC5 | 958 | WO2016049230 SEQ ID NO: 11 |
| AAVF6/HSC6 | 959 | WO2016049230 SEQ ID NO: 7 |
| AAVF7/HSC7 | 960 | WO2016049230 SEQ ID NO: 8 |
| AAVF8/HSC8 | 961 | WO2016049230 SEQ ID NO: 9 |
| AAVF9/HSC9 | 962 | WO2016049230 SEQ ID NO: 10 |
| AAVF11/HSC11 | 963 | WO2016049230 SEQ ID NO: 4 |
| AAVF12/HSC12 | 964 | WO2016049230 SEQ ID NO: 12 |
| AAVF13/HSC13 | 965 | WO2016049230 SEQ ID NO: 14 |
| AAVF14/HSC14 | 966 | WO2016049230 SEQ ID NO: 15 |
| AAVF15/HSC15 | 967 | WO2016049230 SEQ ID NO: 16 |
| AAVF16/HSC16 | 968 | WO2016049230 SEQ ID NO: 17 |
| AAVF17/HSC17 | 969 | WO2016049230 SEQ ID NO: 13 |
| AAV CBr-E1 | 970 | U.S. Pat. No. 8,734,809 SEQ ID NO: 13 |
| AAV CBr-E2 | 971 | U.S. Pat. No. 8,734,809 SEQ ID NO: 14 |
| AAV CBr-E3 | 972 | U.S. Pat. No. 8,734,809 SEQ ID NO: 15 |
| AAV CBr-E4 | 973 | U.S. Pat. No. 8,734,809 SEQ ID NO: 16 |
| AAV CBr-E5 | 974 | U.S. Pat. No. 8,734,809 SEQ ID NO: 17 |
| AAV CBr-e5 | 975 | U.S. Pat. No. 8,734,809 SEQ ID NO: 18 |
| AAV CBr-E6 | 976 | U.S. Pat. No. 8,734,809 SEQ ID NO: 19 |
| AAV CBr-E7 | 977 | U.S. Pat. No. 8,734,809 SEQ ID NO: 20 |
| AAV CBr-E8 | 978 | U.S. Pat. No. 8,734,809 SEQ ID NO: 21 |
| AAV CLv-D1 | 979 | U.S. Pat. No. 8,734,809 SEQ ID NO: 22 |
| AAV CLv-D2 | 980 | U.S. Pat. No. 8,734,809 SEQ ID NO: 23 |
| AAV CLv-D3 | 981 | U.S. Pat. No. 8,734,809 SEQ ID NO: 24 |
| AAV CLv-D4 | 982 | U.S. Pat. No. 8,734,809 SEQ ID NO: 25 |
| AAV CLv-D5 | 983 | U.S. Pat. No. 8,734,809 SEQ ID NO: 26 |
| AAV CLv-D6 | 984 | U.S. Pat. No. 8,734,809 SEQ ID NO: 27 |
| AAV CLv-D7 | 985 | U.S. Pat. No. 8,734,809 SEQ ID NO: 28 |
| AAV CLv-D8 | 986 | U.S. Pat. No. 8,734,809 SEQ ID NO: 29 |
| AAV CLv-E1 | 987 | U.S. Pat. No. 8,734,809 SEQ ID NO: 13 |
| AAV CLv-R1 | 988 | U.S. Pat. No. 8,734,809 SEQ ID NO: 30 |
| AAV CLv-R2 | 989 | U.S. Pat. No. 8,734,809 SEQ ID NO: 31 |
| AAV CLv-R3 | 990 | U.S. Pat. No. 8,734,809 SEQ ID NO: 32 |
| AAV CLv-R4 | 991 | U.S. Pat. No. 8,734,809 SEQ ID NO: 33 |
| AAV CLv-R5 | 992 | U.S. Pat. No. 8,734,809 SEQ ID NO: 34 |
| AAV CLv-R6 | 993 | U.S. Pat. No. 8,734,809 SEQ ID NO: 35 |
| AAV CLv-R7 | 994 | U.S. Pat. No. 8,734,809 SEQ ID NO: 36 |
| AAV CLv-R8 | 995 | U.S. Pat. No. 8,734,809 SEQ ID NO: 37 |
| AAV CLv-R9 | 996 | U.S. Pat. No. 8,734,809 SEQ ID NO: 38 |
| AAV CLg-F1 | 997 | U.S. Pat. No. 8,734,809 SEQ ID NO: 39 |
| AAV CLg-F2 | 998 | U.S. Pat. No. 8,734,809 SEQ ID NO: 40 |
| AAV CLg-F3 | 999 | U.S. Pat. No. 8,734,809 SEQ ID NO: 41 |
| AAV CLg-F4 | 1000 | U.S. Pat. No. 8,734,809 SEQ ID NO: 42 |
| AAV CLg-F5 | 1001 | U.S. Pat. No. 8,734,809 SEQ ID NO: 43 |
| AAV CLg-F6 | 1002 | U.S. Pat. No. 8,734,809 SEQ ID NO: 43 |
| AAV CLg-F7 | 1003 | U.S. Pat. No. 8,734,809 SEQ ID NO: 44 |
| AAV CLg-F8 | 1004 | U.S. Pat. No. 8,734,809 SEQ ID NO: 43 |
| AAV CSp-1 | 1005 | U.S. Pat. No. 8,734,809 SEQ ID NO: 45 |
| AAV CSp-10 | 1006 | U.S. Pat. No. 8,734,809 SEQ ID NO: 46 |
| AAV CSp-11 | 1007 | U.S. Pat. No. 8,734,809 SEQ ID NO: 47 |
| AAV CSp-2 | 1008 | U.S. Pat. No. 8,734,809 SEQ ID NO: 48 |
| AAV CSp-3 | 1009 | U.S. Pat. No. 8,734,809 SEQ ID NO: 49 |
| AAV CSp-4 | 1010 | U.S. Pat. No. 8,734,809 SEQ ID NO: 50 |
| AAV CSp-6 | 1011 | U.S. Pat. No. 8,734,809 SEQ ID NO: 51 |
| AAV CSp-7 | 1012 | U.S. Pat. No. 8,734,809 SEQ ID NO: 52 |
| AAV CSp-8 | 1013 | U.S. Pat. No. 8,734,809 SEQ ID NO: 53 |
| AAV CSp-9 | 1014 | U.S. Pat. No. 8,734,809 SEQ ID NO: 54 |
| AAV CHt-2 | 1015 | U.S. Pat. No. 8,734,809 SEQ ID NO: 55 |
| AAV CHt-3 | 1016 | U.S. Pat. No. 8,734,809 SEQ ID NO: 56 |
| AAV CKd-1 | 1017 | U.S. Pat. No. 8,734,809 SEQ ID NO: 57 |
| AAV CKd-10 | 1018 | U.S. Pat. No. 8,734,809 SEQ ID NO: 58 |
| AAV CKd-2 | 1019 | U.S. Pat. No. 8,734,809 SEQ ID NO: 59 |
| AAV CKd-3 | 1020 | U.S. Pat. No. 8,734,809 SEQ ID NO: 60 |
| AAV CKd-4 | 1021 | U.S. Pat. No. 8,734,809 SEQ ID NO: 61 |
| AAV CKd-6 | 1022 | U.S. Pat. No. 8,734,809 SEQ ID NO: 62 |
| AAV CKd-7 | 1023 | U.S. Pat. No. 8,734,809 SEQ ID NO: 63 |
| AAV CKd-8 | 1024 | U.S. Pat. No. 8,734,809 SEQ ID NO: 64 |
| AAV CLv-1 | 1025 | U.S. Pat. No. 8,734,809 SEQ ID NO: 65 |
| AAV CLv-12 | 1026 | U.S. Pat. No. 8,734,809 SEQ ID NO: 66 |
| AAV CLv-13 | 1027 | U.S. Pat. No. 8,734,809 SEQ ID NO: 67 |
| AAV CLv-2 | 1028 | U.S. Pat. No. 8,734,809 SEQ ID NO: 68 |
| AAV CLv-3 | 1029 | U.S. Pat. No. 8,734,809 SEQ ID NO: 69 |
| AAV CLv-4 | 1030 | U.S. Pat. No. 8,734,809 SEQ ID NO: 70 |
| AAV CLv-6 | 1031 | U.S. Pat. No. 8,734,809 SEQ ID NO: 71 |
| AAV CLv-8 | 1032 | U.S. Pat. No. 8,734,809 SEQ ID NO: 72 |
| AAV CKd-B1 | 1033 | U.S. Pat. No. 8,734,809 SEQ ID NO: 73 |
| AAV CKd-B2 | 1034 | U.S. Pat. No. 8,734,809 SEQ ID NO: 74 |
| AAV CKd-B3 | 1035 | U.S. Pat. No. 8,734,809 SEQ ID NO: 75 |
| AAV CKd-B4 | 1036 | U.S. Pat. No. 8,734,809 SEQ ID NO: 76 |
| AAV CKd-B5 | 1037 | U.S. Pat. No. 8,734,809 SEQ ID NO: 77 |
| AAV CKd-B6 | 1038 | U.S. Pat. No. 8,734,809 SEQ ID NO: 78 |
| AAV CKd-B7 | 1039 | U.S. Pat. No. 8,734,809 SEQ ID NO: 79 |
| AAV CKd-B8 | 1040 | U.S. Pat. No. 8,734,809 SEQ ID NO: 80 |
| AAV CKd-H1 | 1041 | U.S. Pat. No. 8,734,809 SEQ ID NO: 81 |
| AAV CKd-H2 | 1042 | U.S. Pat. No. 8,734,809 SEQ ID NO: 82 |
| AAV CKd-H3 | 1043 | U.S. Pat. No. 8,734,809 SEQ ID NO: 83 |
| AAV CKd-H4 | 1044 | U.S. Pat. No. 8,734,809 SEQ ID NO: 84 |
| AAV CKd-H5 | 1045 | U.S. Pat. No. 8,734,809 SEQ ID NO: 85 |
| AAV CKd-H6 | 1046 | U.S. Pat. No. 8,734,809 SEQ ID NO: 77 |
| AAV CHt-1 | 1047 | U.S. Pat. No. 8,734,809 SEQ ID NO: 86 |
| AAV CLv1-1 | 1048 | U.S. Pat. No. 8,734,809 SEQ ID NO: 171 |
| AAV CLv1-2 | 1049 | U.S. Pat. No. 8,734,809 SEQ ID NO: 172 |
| AAV CLv1-3 | 1050 | U.S. Pat. No. 8,734,809 SEQ ID NO: 173 |
| AAV CLv1-4 | 1051 | U.S. Pat. No. 8,734,809 SEQ ID NO: 174 |
| AAV Clv1-7 | 1052 | U.S. Pat. No. 8,734,809 SEQ ID NO: 175 |
| AAV Clv1-8 | 1053 | U.S. Pat. No. 8,734,809 SEQ ID NO: 176 |
| AAV Clv1-9 | 1054 | U.S. Pat. No. 8,734,809 SEQ ID NO: 177 |
| AAV Clv1-10 | 1055 | U.S. Pat. No. 8,734,809 SEQ ID NO: 178 |
| AAV.VR-355 | 1056 | U.S. Pat. No. 8,734,809 SEQ ID NO: 181 |
| AAV.hu.48R3 | 1057 | U.S. Pat. No. 8,734,809 SEQ ID NO: 183 |
| AAV CBr-E1 | 1058 | U.S. Pat. No. 8,734,809 SEQ ID NO: 87 |
| AAV CBr-E2 | 1059 | U.S. Pat. No. 8,734,809 SEQ ID NO: 88 |
| AAV CBr-E3 | 1060 | U.S. Pat. No. 8,734,809 SEQ ID NO: 89 |
| AAV CBr-E4 | 1061 | U.S. Pat. No. 8,734,809 SEQ ID NO: 90 |
| AAV CBr-E5 | 1062 | U.S. Pat. No. 8,734,809 SEQ ID NO: 91 |
| AAV CBr-e5 | 1063 | U.S. Pat. No. 8,734,809 SEQ ID NO: 92 |
| AAV CBr-E6 | 1064 | U.S. Pat. No. 8,734,809 SEQ ID NO: 93 |
| AAV CBr-E7 | 1065 | U.S. Pat. No. 8,734,809 SEQ ID NO: 94 |
| AAV CBr-E8 | 1066 | U.S. Pat. No. 8,734,809 SEQ ID NO: 95 |
| AAV CLv-D1 | 1067 | U.S. Pat. No. 8,734,809 SEQ ID NO: 96 |
| AAV CLv-D2 | 1068 | U.S. Pat. No. 8,734,809 SEQ ID NO: 97 |
| AAV CLv-D3 | 1069 | U.S. Pat. No. 8,734,809 SEQ ID NO: 98 |
| AAV CLv-D4 | 1070 | U.S. Pat. No. 8,734,809 SEQ ID NO: 99 |
| AAV CLv-D5 | 1071 | U.S. Pat. No. 8,734,809 SEQ ID NO: 100 |
| AAV CLv-D6 | 1072 | U.S. Pat. No. 8,734,809 SEQ ID NO: 101 |
| AAV CLv-D7 | 1073 | U.S. Pat. No. 8,734,809 SEQ ID NO: 102 |
| AAV CLv-D8 | 1074 | U.S. Pat. No. 8,734,809 SEQ ID NO: 103 |
| AAV CLv-E1 | 1075 | U.S. Pat. No. 8,734,809 SEQ ID NO: 87 |
| AAV CLv-R1 | 1076 | U.S. Pat. No. 8,734,809 SEQ ID NO: 104 |
| AAV CLv-R2 | 1077 | U.S. Pat. No. 8,734,809 SEQ ID NO: 105 |
| AAV CLv-R3 | 1078 | U.S. Pat. No. 8,734,809 SEQ ID NO: 106 |
| AAV CLv-R4 | 1079 | U.S. Pat. No. 8,734,809 SEQ ID NO: 107 |
| AAV CLv-R5 | 1080 | U.S. Pat. No. 8,734,809 SEQ ID NO: 108 |
| AAV CLv-R6 | 1081 | U.S. Pat. No. 8,734,809 SEQ ID NO: 109 |
| AAV CLv-R7 | 1082 | U.S. Pat. No. 8,734,809 SEQ ID NO: 110 |
| AAV CLv-R8 | 1083 | U.S. Pat. No. 8,734,809 SEQ ID NO: 111 |
| AAV CLv-R9 | 1084 | U.S. Pat. No. 8,734,809 SEQ ID NO: 112 |
| AAV CLg-F1 | 1085 | U.S. Pat. No. 8,734,809 SEQ ID NO: 113 |
| AAV CLg-F2 | 1086 | U.S. Pat. No. 8,734,809 SEQ ID NO: 114 |
| AAV CLg-F3 | 1087 | U.S. Pat. No. 8,734,809 SEQ ID NO: 115 |
| AAV CLg-F4 | 1088 | U.S. Pat. No. 8,734,809 SEQ ID NO: 116 |
| AAV CLg-F5 | 1089 | U.S. Pat. No. 8,734,809 SEQ ID NO: 117 |
| AAV CLg-F6 | 1090 | U.S. Pat. No. 8,734,809 SEQ ID NO: 117 |
| AAV CLg-F7 | 1091 | U.S. Pat. No. 8,734,809 SEQ ID NO: 118 |
| AAV CLg-F8 | 1092 | U.S. Pat. No. 8,734,809 SEQ ID NO: 117 |
| AAV CSp-1 | 1093 | U.S. Pat. No. 8,734,809 SEQ ID NO: 119 |
| AAV CSp-10 | 1094 | U.S. Pat. No. 8,734,809 SEQ ID NO: 120 |
| AAV CSp-11 | 1095 | U.S. Pat. No. 8,734,809 SEQ ID NO: 121 |
| AAV CSp-2 | 1096 | U.S. Pat. No. 8,734,809 SEQ ID NO: 122 |
| AAV CSp-3 | 1097 | U.S. Pat. No. 8,734,809 SEQ ID NO: 123 |
| AAV CSp-4 | 1098 | U.S. Pat. No. 8,734,809 SEQ ID NO: 124 |
| AAV CSp-6 | 1099 | U.S. Pat. No. 8,734,809 SEQ ID NO: 125 |
| AAV CSp-7 | 1100 | U.S. Pat. No. 8,734,809 SEQ ID NO: 126 |
| AAV CSp-8 | 1101 | U.S. Pat. No. 8,734,809 SEQ ID NO: 127 |
| AAV CSp-9 | 1102 | U.S. Pat. No. 8,734,809 SEQ ID NO: 128 |
| AAV CHt-2 | 1103 | U.S. Pat. No. 8,734,809 SEQ ID NO: 129 |
| AAV CHt-3 | 1104 | U.S. Pat. No. 8,734,809 SEQ ID NO: 130 |
| AAV CKd-1 | 1105 | U.S. Pat. No. 8,734,809 SEQ ID NO: 131 |
| AAV CKd-10 | 1106 | U.S. Pat. No. 8,734,809 SEQ ID NO: 132 |
| AAV CKd-2 | 1107 | U.S. Pat. No. 8,734,809 SEQ ID NO: 133 |
| AAV CKd-3 | 1108 | U.S. Pat. No. 8,734,809 SEQ ID NO: 134 |
| AAV CKd-4 | 1109 | U.S. Pat. No. 8,734,809 SEQ ID NO: 135 |
| AAV CKd-6 | 1110 | U.S. Pat. No. 8,734,809 SEQ ID NO: 136 |
| AAV CKd-7 | 1111 | U.S. Pat. No. 8,734,809 SEQ ID NO: 137 |
| AAV CKd-8 | 1112 | U.S. Pat. No. 8,734,809 SEQ ID NO: 138 |
| AAV CLv-1 | 1113 | U.S. Pat. No. 8,734,809 SEQ ID NO: 139 |
| AAV CLv-12 | 1114 | U.S. Pat. No. 8,734,809 SEQ ID NO: 140 |
| AAV CLv-13 | 1115 | U.S. Pat. No. 8,734,809 SEQ ID NO: 141 |
| AAV CLv-2 | 1116 | U.S. Pat. No. 8,734,809 SEQ ID NO: 142 |
| AAV CLv-3 | 1117 | U.S. Pat. No. 8,734,809 SEQ ID NO: 143 |
| AAV CLv-4 | 1118 | U.S. Pat. No. 8,734,809 SEQ ID NO: 144 |
| AAV CLv-6 | 1119 | U.S. Pat. No. 8,734,809 SEQ ID NO: 145 |
| AAV CLv-8 | 1120 | U.S. Pat. No. 8,734,809 SEQ ID NO: 146 |
| AAV CKd-B1 | 1121 | U.S. Pat. No. 8,734,809 SEQ ID NO: 147 |
| AAV CKd-B2 | 1122 | U.S. Pat. No. 8,734,809 SEQ ID NO: 148 |
| AAV CKd-B3 | 1123 | U.S. Pat. No. 8,734,809 SEQ ID NO: 149 |
| AAV CKd-B4 | 1124 | U.S. Pat. No. 8,734,809 SEQ ID NO: 150 |
| AAV CKd-B5 | 1125 | U.S. Pat. No. 8,734,809 SEQ ID NO: 151 |
| AAV CKd-B6 | 1126 | U.S. Pat. No. 8,734,809 SEQ ID NO: 152 |
| AAV CKd-B7 | 1127 | U.S. Pat. No. 8,734,809 SEQ ID NO: 153 |
| AAV CKd-B8 | 1128 | U.S. Pat. No. 8,734,809 SEQ ID NO: 154 |
| AAV CKd-H1 | 1129 | U.S. Pat. No. 8,734,809 SEQ ID NO: 155 |
| AAV CKd-H2 | 1130 | U.S. Pat. No. 8,734,809 SEQ ID NO: 156 |
| AAV CKd-H3 | 1131 | U.S. Pat. No. 8,734,809 SEQ ID NO: 157 |
| AAV CKd-H4 | 1132 | U.S. Pat. No. 8,734,809 SEQ ID NO: 158 |
| AAV CKd-H5 | 1133 | U.S. Pat. No. 8,734,809 SEQ ID NO: 159 |
| AAV CKd-H6 | 1134 | U.S. Pat. No. 8,734,809 SEQ ID NO: 151 |
| AAV CHt-1 | 1135 | U.S. Pat. No. 8,734,809 SEQ ID NO: 160 |
| AAV CHt-P2 | 1136 | WO2016065001 SEQ ID NO: 1 |
| AAV CHt-P5 | 1137 | WO2016065001 SEQ ID NO: 2 |
| AAV CHt-P9 | 1138 | WO2016065001 SEQ ID NO: 3 |
| AAV CBr-7.1 | 1139 | WO2016065001 SEQ ID NO: 4 |
| AAV CBr-7.2 | 1140 | WO2016065001 SEQ ID NO: 5 |
| AAV CBr-7.3 | 1141 | WO2016065001 SEQ ID NO: 6 |
| AAV CBr-7.4 | 1142 | WO2016065001 SEQ ID NO: 7 |
| AAV CBr-7.5 | 1143 | WO2016065001 SEQ ID NO: 8 |
| AAV CBr-7.7 | 1144 | WO2016065001 SEQ ID NO: 9 |
| AAV CBr-7.8 | 1145 | WO2016065001 SEQ ID NO: 10 |
| AAV CBr-7.10 | 1146 | WO2016065001 SEQ ID NO: 11 |
| AAV CKd-N3 | 1147 | WO2016065001 SEQ ID NO: 12 |
| AAV CKd-N4 | 1148 | WO2016065001 SEQ ID NO: 13 |
| AAV CKd-N9 | 1149 | WO2016065001 SEQ ID NO: 14 |
| AAV CLv-L4 | 1150 | WO2016065001 SEQ ID NO: 15 |
| AAV CLv-L5 | 1151 | WO2016065001 SEQ ID NO: 16 |
| AAV CLv-L6 | 1152 | WO2016065001 SEQ ID NO: 17 |
| AAV CLv-K1 | 1153 | WO2016065001 SEQ ID NO: 18 |
| AAV CLv-K3 | 1154 | WO2016065001 SEQ ID NO: 19 |
| AAV CLv-K6 | 1155 | WO2016065001 SEQ ID NO: 20 |
| AAV CLv-M1 | 1156 | WO2016065001 SEQ ID NO: 21 |
| AAV CLv-M11 | 1157 | WO2016065001 SEQ ID NO: 22 |
| AAV CLv-M2 | 1158 | WO2016065001 SEQ ID NO: 23 |
| AAV CLv-M5 | 1159 | WO2016065001 SEQ ID NO: 24 |
| AAV CLv-M6 | 1160 | WO2016065001 SEQ ID NO: 25 |
| AAV CLv-M7 | 1161 | WO2016065001 SEQ ID NO: 26 |
| AAV CLv-M8 | 1162 | WO2016065001 SEQ ID NO: 27 |
| AAV CLv-M9 | 1163 | WO2016065001 SEQ ID NO: 28 |
| AAV CHt-P1 | 1164 | WO2016065001 SEQ ID NO: 29 |
| AAV CHt-P6 | 1165 | WO2016065001 SEQ ID NO: 30 |
| AAV CHt-P8 | 1166 | WO2016065001 SEQ ID NO: 31 |
| AAV CHt-6.1 | 1167 | WO2016065001 SEQ ID NO: 32 |
| AAV CHt-6.10 | 1168 | WO2016065001 SEQ ID NO: 33 |
| AAV CHt-6.5 | 1169 | WO2016065001 SEQ ID NO: 34 |
| AAV CHt-6.6 | 1170 | WO2016065001 SEQ ID NO: 35 |
| AAV CHt-6.7 | 1171 | WO2016065001 SEQ ID NO: 36 |
| AAV CHt-6.8 | 1172 | WO2016065001 SEQ ID NO: 37 |
| AAV CSp-8.10 | 1173 | WO2016065001 SEQ ID NO: 38 |
| AAV CSp-8.2 | 1174 | WO2016065001 SEQ ID NO: 39 |
| AAV CSp-8.4 | 1175 | WO2016065001 SEQ ID NO: 40 |
| AAV CSp-8.5 | 1176 | WO2016065001 SEQ ID NO: 41 |
| AAV CSp-8.6 | 1177 | WO2016065001 SEQ ID NO: 42 |
| AAV CSp-8.7 | 1178 | WO2016065001 SEQ ID NO: 43 |
| AAV CSp-8.8 | 1179 | WO2016065001 SEQ ID NO: 44 |
| AAV CSp-8.9 | 1180 | WO2016065001 SEQ ID NO: 45 |
| AAV CBr-B7.3 | 1181 | WO2016065001 SEQ ID NO: 46 |
| AAV CBr-B7.4 | 1182 | WO2016065001 SEQ ID NO: 47 |
| AAV3B | 1183 | WO2016065001 SEQ ID NO: 48 |
| AAV4 | 1184 | WO2016065001 SEQ ID NO: 49 |
| AAV5 | 1185 | WO2016065001 SEQ ID NO: 50 |
| AAV CHt-P2 | 1186 | WO2016065001 SEQ ID NO: 51 |
| AAV CHt-P5 | 1187 | WO2016065001 SEQ ID NO: 52 |
| AAV CHt-P9 | 1188 | WO2016065001 SEQ ID NO: 53 |
| AAV CBr-7.1 | 1189 | WO2016065001 SEQ ID NO: 54 |
| AAV CBr-7.2 | 1190 | WO2016065001 SEQ ID NO: 55 |
| AAV CBr-7.3 | 1191 | WO2016065001 SEQ ID NO: 56 |
| AAV CBr-7.4 | 1192 | WO2016065001 SEQ ID NO: 57 |
| AAV CBr-7.5 | 1193 | WO2016065001 SEQ ID NO: 58 |
| AAV CBr-7.7 | 1194 | WO2016065001 SEQ ID NO: 59 |
| AAV CBr-7.8 | 1195 | WO2016065001 SEQ ID NO: 60 |
| AAV CBr-7.10 | 1196 | WO2016065001 SEQ ID NO: 61 |
| AAV CKd-N3 | 1197 | WO2016065001 SEQ ID NO: 62 |
| AAV CKd-N4 | 1198 | WO2016065001 SEQ ID NO: 63 |
| AAV CKd-N9 | 1199 | WO2016065001 SEQ ID NO: 64 |
| AAV CLv-L4 | 1200 | WO2016065001 SEQ ID NO: 65 |
| AAV CLv-L5 | 1201 | WO2016065001 SEQ ID NO: 66 |
| AAV CLv-L6 | 1202 | WO2016065001 SEQ ID NO: 67 |
| AAV CLv-K1 | 1203 | WO2016065001 SEQ ID NO: 68 |
| AAV CLv-K3 | 1204 | WO2016065001 SEQ ID NO: 69 |
| AAV CLv-K6 | 1205 | WO2016065001 SEQ ID NO: 70 |
| AAV CLv-M1 | 1206 | WO2016065001 SEQ ID NO: 71 |
| AAV CLv-M11 | 1207 | WO2016065001 SEQ ID NO: 72 |
| AAV CLv-M2 | 1208 | WO2016065001 SEQ ID NO: 73 |
| AAV CLv-M5 | 1209 | WO2016065001 SEQ ID NO: 74 |
| AAV CLv-M6 | 1210 | WO2016065001 SEQ ID NO: 75 |
| AAV CLv-M7 | 1211 | WO2016065001 SEQ ID NO: 76 |
| AAV CLv-M8 | 1212 | WO2016065001 SEQ ID NO: 77 |
| AAV CLv-M9 | 1213 | WO2016065001 SEQ ID NO: 78 |
| AAV CHt-P1 | 1214 | WO2016065001 SEQ ID NO: 79 |
| AAV CHt-P6 | 1215 | WO2016065001 SEQ ID NO: 80 |
| AAV CHt-P8 | 1216 | WO2016065001 SEQ ID NO: 81 |
| AAV CHt-6.1 | 1217 | WO2016065001 SEQ ID NO: 82 |
| AAV CHt-6.10 | 1218 | WO2016065001 SEQ ID NO: 83 |
| AAV CHt-6.5 | 1219 | WO2016065001 SEQ ID NO: 84 |
| AAV CHt-6.6 | 1220 | WO2016065001 SEQ ID NO: 85 |
| AAV CHt-6.7 | 1221 | WO2016065001 SEQ ID NO: 86 |
| AAV CHt-6.8 | 1222 | WO2016065001 SEQ ID NO: 87 |
| AAV CSp-8.10 | 1223 | WO2016065001 SEQ ID NO: 88 |
| AAV CSp-8.2 | 1224 | WO2016065001 SEQ ID NO: 89 |
| AAV CSp-8.4 | 1225 | WO2016065001 SEQ ID NO: 90 |
| AAV CSp-8.5 | 1226 | WO2016065001 SEQ ID NO: 91 |
| AAV CSp-8.6 | 1227 | WO2016065001 SEQ ID NO: 92 |
| AAV CSp-8.7 | 1228 | WO2016065001 SEQ ID NO: 93 |
| AAV CSp-8.8 | 1229 | WO2016065001 SEQ ID NO: 94 |
| AAV CSp-8.9 | 1230 | WO2016065001 SEQ ID NO: 95 |
| AAV CBr-B7.3 | 1231 | WO2016065001 SEQ ID NO: 96 |
| AAV CBr-B7.4 | 1232 | WO2016065001 SEQ ID NO: 97 |
| AAV3B | 1233 | WO2016065001 SEQ ID NO: 98 |
| AAV4 | 1234 | WO2016065001 SEQ ID NO: 99 |
| AAV5 | 1235 | WO2016065001 SEQ ID NO: 100 |
| AAVPHP.B or | 1236 | WO2015038958 SEQ ID NO: 8 and 13; GenBankALU85156.1 |
| G2B-26 | | |
| AAVPHP.B | 1237 | WO2015038958 SEQ ID NO: 9 |
| AAVG2B-13 | 1238 | WO2015038958 SEQ ID NO: 12 |
| AAVTH1.1-32 | 1239 | WO2015038958 SEQ ID NO: 14 |
| AAVTH1.1-35 | 1240 | WO2015038958 SEQ ID NO: 15 |

[0323] Each of the patents, applications and/or publications listed in Table 11 are hereby incorporated by reference in their entirety.

[0324] In one embodiment, the AAV serotype may be, or may have a sequence as described in International Patent Publication WO2015038958, the contents of which are herein incorporated by reference in their entirety, such as, but not limited to, AAV9 (SEQ ID NO: 2 and 11 of WO2015038958 or SEQ ID NO: 494 and 495 respectively herein), AAV-PHP.B (PHP.B) (SEQ ID NO: 8 and 9 of WO2015038958, herein SEQ ID NO: 1236 and 1237), G2B-13 (SEQ ID NO: 12 of WO2015038958, herein SEQ ID NO: 1238), G2B-26 (SEQ ID NO: 13 of WO2015038958, herein SEQ ID NO: 1236 and 1237), TH1.1-32 (SEQ ID NO: 14 of WO2015038958, herein SEQ ID NO: 1239), TH1.1-35 (SEQ ID NO: 15 of WO2015038958, herein SEQ ID NO: 1240) or variants thereof. Further, any of the targeting peptides or amino acid inserts described in WO2015038958, may be inserted into any parent AAV serotype, such as, but not limited to, AAV9 (SEQ ID NO: 494 for the DNA sequence and SEQ ID NO: 495 for the amino acid sequence). In one embodiment, the amino acid insert is inserted between amino acids 586-592 of the parent AAV (e.g., AAV9). In another embodiment, the amino acid insert is inserted between amino acids 588-589 of the parent AAV sequence. The amino acid insert may be, but is not limited to, any of the following amino acid sequences, TLAVPFK (SEQ ID NO: 1 of WO2015038958; herein SEQ ID NO: 1241), KFPVALT (SEQ ID NO: 3 of WO2015038958; herein SEQ ID NO: 1242), LAVPFK (SEQ ID NO: 31 of WO2015038958; herein SEQ ID NO: 1243), AVPFK (SEQ ID NO: 32 of WO2015038958; herein SEQ ID NO: 1244), VPFK (SEQ ID NO: 33 of WO2015038958; herein SEQ ID NO: 1245), TLAVPF (SEQ ID NO: 34 of WO2015038958; herein SEQ ID NO: 1246), TLAVP (SEQ ID NO: 35 of WO2015038958; herein SEQ ID NO: 1247), TLAV (SEQ ID NO: 36 of WO2015038958; herein SEQ ID NO: 1248), SVSKPFL (SEQ ID NO: 28 of WO2015038958; herein SEQ ID NO: 1249), FTLTTPK (SEQ ID NO: 29 of WO2015038958; herein SEQ ID NO: 1250), MNATKNV (SEQ ID NO: 30 of WO2015038958; herein SEQ ID NO: 1251), QSSQTPR (SEQ ID NO: 54 of WO2015038958; herein SEQ ID NO: 1252), ILGTGTS (SEQ ID NO: 55 of WO2015038958; herein SEQ ID NO: 1253), TRTNPEA (SEQ ID NO: 56 of WO2015038958; herein SEQ ID NO: 1254), NGGTSSS (SEQ ID NO: 58 of WO2015038958; herein SEQ ID NO: 1255), or YTLSQGW (SEQ ID NO: 60 of WO2015038958; herein SEQ ID NO: 1256). Non-limiting examples of nucleotide sequences that may encode the amino acid inserts include the following, AAGTTTCCTGTGGCGTTGACT (for SEQ ID NO: 3 of WO2015038958; herein SEQ ID NO: 1257), ACTTTGGCGGTGCCTTTTAAG (SEQ ID NO: 24 and 49 of WO2015038958; herein SEQ ID NO: 1258), AGTGTGAGTAAGCCTTTTTTG (SEQ ID NO: 25 of WO2015038958; herein SEQ ID NO: 1259), TTTACGTTGACGACGCCTAAG (SEQ ID NO: 26 of WO2015038958; herein SEQ ID NO: 1260), ATGAATGCTACGAAGAATGTG (SEQ ID NO: 27 of WO2015038958; herein SEQ ID NO: 1261), CAGTCGTCGCAGACGCCTAGG (SEQ ID NO: 48 of WO2015038958; herein SEQ ID NO: 1262), ATTCTGGGGACTGGTACTTCG (SEQ ID NO: 50 and 52 of WO2015038958; herein SEQ ID NO: 1263), ACGCGGACTAATCCTGAGGCT (SEQ ID NO: 51 of WO2015038958; herein SEQ ID NO: 1264), AATGGGGGGACTAGTAGTTCT (SEQ ID NO: 53 of WO2015038958; herein SEQ ID NO: 1265), or TATACTTTGTCGCAGGGTTGG (SEQ ID NO: 59 of WO2015038958; herein SEQ ID NO: 1266).

[0325] In one embodiment, the AAV serotype may be engineered to comprise at least one AAV capsid CD8+ T-cell epitope. Hui et al. (Molecular Therapy-Methods & Clinical Development (2015) 2, 15029 doi: 10.1038/mtm.2015.29; the contents of which are herein incorporated by reference in its entirety) identified AAV capsid-specific CD8+ T-cell epitopes for AAV1 and AAV2 (see e.g., Table 2 in the publication). As a non-limiting example, the capsid-specific CD8+ T-cell epitope may be for an AAV2 serotype. As a non-limiting example, the capsid-specific CD8+ T-cell epitope may be for an AAV1 serotype.

[0326] In one embodiment, the AAV serotype may be engineered to comprise at least one AAV capsid CD8+ T-cell epitope for AAV2 such as, but not limited to, SADNNNSEY (SEQ ID NO: 1267), LIDQYLYYL (SEQ ID NO: 1268), VPQYGYLTL (SEQ ID NO: 1269), TTSTRTWAL (SEQ ID NO: 1270), YHLNGRDSL (SEQ ID NO: 1271), SQAVGRSSF (SEQ ID NO: 1272), VPANPSTTF (SEQ ID NO: 1273), FPQSGVLIF (SEQ ID NO: 1274), YFDFNRFHCHFSPRD (SEQ ID NO: 1275), VGNSSGNWHCDSTWM (SEQ ID NO: 1276), QFSQAGASDIRDQSR (SEQ ID NO: 1277), GASDIRQSRNWLP (SEQ ID NO: 1278) and GNRQAATADVNTQGV (SEQ ID NO: 1279).

[0327] In one embodiment, the AAV serotype may be engineered to comprise at least one AAV capsid CD8+ T-cell epitope for AAV1 such as, but not limited to, LDRLMNPLI (SEQ ID NO: 1280), TTSTRTWAL (SEQ ID NO: 1270), and QPAKKRLNF (SEQ ID NO: 1281)).

[0328] In one embodiment, peptides for inclusion in an AAV serotype may be identified using the methods described by Hui et al. (Molecular Therapy-Methods & Clinical Development (2015) 2, 15029 doi: 10.1038/mtm.2015.29; the contents of which are herein incorporated by reference in its entirety). As a non-limiting example, the procedure includes isolating human splenocytes, restimulating the splenocytes in vitro using individual peptides spanning the amino acid sequence of the AAV capsid protein, IFN-gamma ELISpot with the individual peptides used for the in vitro restimulation, bioinformatics analysis to determine the HLA restriction of 15-mers identified by IFN-gamma ELISpot, identification of candidate reactive 9-mer epitopes for a given HLA allele, synthesis candidate 9-mers, second IFN-gamma ELISpot screening of splenocytes from subjects carrying the HLA alleles to which identified AAV epitopes are predicted to bind, determine the AAV capsid-reactive CD8+ T cell epitopes and determine the frequency of subjects reacting to a given AAV epitope.

[0329] In one embodiment, the AAV may be a serotype generated by Cre-recombination-based AAV targeted evolution (CREATE) as described by Deverman et al., (Nature Biotechnology 34 (2): 204-209 (2016)), the contents of which are herein incorporated by reference in their entirety. In one embodiment, AAV serotypes generated in this manner have improved CNS transduction and/or neuronal and astrocytic tropism, as compared to other AAV serotypes. As non-limiting examples, the AAV serotype may be PHP.B, PHP.B2, PHP.B3, PHP.A, G2A12, G2A15. In one embodiment, these AAV serotypes may be AAV9 (SEQ ID NO: 494 and 495) derivatives with a 7-amino acid insert between amino acids 588-589. Non-limiting examples of these 7-amino acid inserts include TLAVPFK (SEQ ID NO: 1241), SVSKPFL (SEQ ID NO: 1249), FTLTTPK (SEQ ID NO: 1250), YTLSQGW (SEQ ID NO: 1256), QAVRTSL (SEQ ID NO: 1282) and/or LAKERLS (SEQ ID NO: 1283).

[0330] In one embodiment, the AAV serotype may be as described in Jackson et al (Frontiers in Molecular Neuroscience 9:154 (2016)), the contents of which are herein incorporated by reference in their entirety. In some embodiments, the AAV serotype is PHP.B or AAV9. In some embodiments, the AAV serotype is paired with a synapsin promoter to enhance neuronal transduction, as compared to when more ubiquitous promoters are used (i.e., CBA or CMV).

[0331] In one embodiment, peptides for inclusion in an AAV serotype may be identified by isolating human splenocytes, restimulating the splenocytes in vitro using individual peptides spanning the amino acid sequence of the AAV capsid protein, IFN-gamma ELISpot with the individual peptides used for the in vitro restimulation, bioinformatics analysis to determine the given allele restriction of 15-mers identified by IFN-gamma ELISpot, identification of candidate reactive 9-mer epitopes for a given allele, synthesis candidate 9-mers, second IFN-gamma ELISpot screening of splenocytes from subjects carrying the specific alleles to which identified AAV epitopes are predicted to bind, determine the AAV capsid-reactive CD8+ T cell epitopes and determine the frequency of subjects reacting to a given AAV epitopc.

[0332] AAV vectors comprising the nucleic acid sequence for the siRNA molecules may be prepared or derived from various serotypes of AAVs, including, but not limited to, AAV1, AAV2, AAV3, AAV4, AAV5, AAV6, AAV7, AAV8, AAV9, AAV9.47, AAV9 (hu14), AAV10, AAV11, AAV12, AAVrh8, AAVrh10, AAV-DJ8, AAV-DJ, AAV-PHP.A (PHP.A), and/or AAV-PHP.B (PHP.B). In some cases, different serotypes of AAVs may be mixed together or with other types of viruses to produce chimeric AAV vectors. As a non-limiting example, the AAV vector is derived from the AAV9 serotype.

### Viral Genome Component: Inverted Terminal Repeats (ITRs)

[0333] The AAV particles of the present invention comprise a viral genome with at least one ITR region and a payload region. In one embodiment, the viral genome has two ITRs. These two ITRs flank the payload region at the 5′ and 3′ ends. The ITRs function as origins of replication comprising recognition sites for replication. ITRs comprise sequence regions which can be complementary and symmetrically arranged. ITRs incorporated into viral genomes of the invention may be comprised of naturally occurring polynucleotide sequences or recombinantly derived polynucleotide sequences.

[0334] The ITRs may be derived from the same serotype as the capsid, selected from any of the serotypes listed in Table 6, or a derivative thereof. The ITR may be of a different serotype from the capsid. In one embodiment, the AAV particle has more than one ITR. In a non-limiting example, the AAV particle has a viral genome comprising two ITRs. In one embodiment, the ITRs are of the same serotype as one another. In another embodiment, the ITRs are of different serotypes. Non-limiting examples include zero, one or both of the ITRs having the same serotype as the capsid. In one embodiment, both ITRs of the viral genome of the AAV particle are AAV2 ITRs.

[0335] Independently, each ITR may be about 100 to about 150 nucleotides in length. An ITR may be about 100-105 nucleotides in length, 106-110 nucleotides in length, 111-115 nucleotides in length, 116-120 nucleotides in length, 121-125 nucleotides in length, 126-130 nucleotides in length, 131-135 nucleotides in length, 136-140 nucleotides in length, 141-145 nucleotides in length or 146-150 nucleotides in length. In one embodiment, the ITRs are 140-142 nucleotides in length. Non-limiting examples of ITR length are 102, 140, 141, 142, 145 nucleotides in length, and those having at least 95% identity thereto.

[0336] In one embodiment, the encoded siRNA molecule may be located near the 5′ end of the flip ITR in an expression vector. In another embodiment, the encoded siRNA molecule may be located near the 3′ end of the flip ITR in an expression vector. In yet another embodiment, the encoded siRNA molecule may be located near the 5′ end of the flop ITR in an expression vector. In yet another embodiment, the encoded siRNA molecule may be located near the 3′ end of the flop ITR in an expression vector. In one embodiment, the encoded siRNA molecule may be located between the 5′ end of the flip ITR and the 3′ end of the flop ITR in an expression vector. In one embodiment, the encoded siRNA molecule may be located between (e.g., half-way between the 5′ end of the flip ITR and 3′ end of the flop ITR or the 3′ end of the flop ITR and the 5′ end of the flip ITR), the 3′ end of the flip ITR and the 5′ end of the flip ITR in an expression vector. As a non-limiting example, the encoded siRNA molecule may be located within 1, 2, 3, 4, 5, 6, 7, 8, 9, 10, 11, 12, 13, 14, 15, 16, 17, 18, 19, 20, 21, 22, 23, 24, 25, 26, 27, 28, 29, 30 or more than 30 nucleotides downstream from the 5′ or 3′ end of an ITR (e.g., Flip or Flop ITR) in an expression vector. As a non-limiting example, the encoded siRNA molecule may be located within 1, 2, 3, 4, 5, 6, 7, 8, 9, 10, 11, 12, 13, 14, 15, 16, 17, 18, 19, 20, 21, 22, 23, 24, 25, 26, 27, 28, 29, 30 or more than 30 nucleotides upstream from the 5′ or 3′ end of an ITR (e.g., Flip or Flop ITR) in an expression vector. As another non-limiting example, the encoded siRNA molecule may be located within 1-5, 1-10, 1-15, 1-20, 1-25, 1-30, 5-10, 5-15, 5-20, 5-25, 5-30, 10-15, 10-20, 10-25, 10-30, 15-20, 15-25, 15-30, 20-25, 20-30 or 25-30 nucleotides downstream from the 5′ or 3′ end of an ITR (e.g., Flip or Flop ITR) in an expression vector. As another non-limiting example, the encoded siRNA molecule may be located within 1-5, 1-10, 1-15, 1-20, 1-25, 1-30, 5-10, 5-15, 5-20, 5-25, 5-30, 10-15, 10-20, 10-25, 10-30, 15-20, 15-25, 15-30, 20-25, 20-30 or 25-30 upstream from the 5′ or 3′ end of an ITR (e.g., Flip or Flop ITR) in an expression vector. As a non-limiting example, the encoded siRNA molecule may be located within the first 1%, 2%, 3%, 4%, 5%, 6%, 7%, 8%, 9%, 10%, 15%, 20%, 25% or more than 25% of the nucleotides upstream from the 5′ or 3′ end of an ITR (e.g., Flip or Flop ITR) in an expression vector. As another non-limiting example, the encoded siRNA molecule may be located with the first 1-5%, 1-10%, 1-15%, 1-20%, 1-25%, 5-10%, 5-15%, 5-20%, 5-25%, 10-15%, 10-20%, 10-25%, 15-20%, 15-25%, or 20-25% downstream from the 5′ or 3′ end of an ITR (e.g., Flip or Flop ITR) in an expression vector.

### Viral Genome Component: Promoters

[0337] A person skilled in the art may recognize that a target cell may require a specific promoter including but not limited to a promoter that is species specific, inducible, tissue-specific, or cell cycle-specific (Parr et al., Nat. Med. 3:1145-9 (1997); the contents of which are herein incorporated by reference in its entirety).

[0338] In one embodiment, the promoter is a promoter deemed to be efficient to drive the expression of the modulatory polynucleotide.

[0339] In one embodiment, the promoter is a promoter having a tropism for the cell being targeted.

[0340] In one embodiment, the promoter is a weak promoter which provides expression of a payload e.g., a modulatory polynucleotide, e.g., siRNA or dsRNA, for a period of time in targeted tissues such as, but not limited to, nervous system tissues. Expression may be for a period of 1 hour, 2, hours, 3 hours, 4 hours, 5 hours, 6 hours, 7 hours, 8 hours, 9 hours, 10 hours, 11 hours, 12 hours, 13 hours, 14 hours, 15 hours, 16 hours, 17 hours, 18 hours, 19 hours, 20 hours, 21 hours, 22 hours, 23 hours, 1 day, 2 days, 3 days, 4 days, 5 days, 6 days, 1 week, 8 days, 9 days, 10 days, 11 days, 12 days, 13 days, 2 weeks, 15 days, 16 days, 17 days, 18 days, 19 days, 20 days, 3 weeks, 22 days, 23 days, 24 days, 25 days, 26 days, 27 days, 28 days, 29 days, 30 days, 31 days, 1 month, 2 months, 3 months, 4 months, 5 months, 6 months, 7 months, 8 months, 9 months, 10 months, 11 months, 1 year, 13 months, 14 months, 15 months, 16 months, 17 months, 18 months, 19 months, 20 months, 21 months, 22 months, 23 months, 2 years, 3 years, 4 years, 5 years, 6 years, 7 years, 8 years, 9 years, 10 years or more than 10 years. Expression may be for 1-5 hours, 1-12 hours, 1-2 days, 1-5 days, 1-2 weeks, 1-3 weeks, 1-4 weeks, 1-2 months, 1-4 months, 1-6 months, 2-6 months, 3-6 months, 3-9 months, 4-8 months, 6-12 months, 1-2 years, 1-5 years, 2-5 years, 3-6 years, 3-8 years, 4-8 years or 5-10 years. As a non-limiting example, the promoter is a weak promoter for sustained expression of a payload in nervous tissues.

[0341] In one embodiment, the promoter may be a promoter which is less than 1 kb. The promoter may have a length of 200, 210, 220, 230, 240, 250, 260, 270, 280, 290, 300, 310, 320, 330, 340, 350, 360, 370, 380, 390, 400, 410, 420, 430, 440, 450, 460, 470, 480, 490, 500, 510, 520, 530, 540, 550, 560, 570, 580, 590, 600, 610, 620, 630, 640, 650, 660, 670, 680, 690, 700, 710, 720, 730, 740, 750, 760, 770, 780, 790, 800 or more than 800. The promoter may have a length between 200-300, 200-400, 200-500, 200-600, 200-700, 200-800, 300-400, 300-500, 300-600, 300-700, 300-800, 400-500, 400-600, 400-700, 400-800, 500-600, 500-700, 500-800, 600-700, 600-800 or 700-800.

[0342] In one embodiment, the promoter may be a combination of two or more components such as, but not limited to, CMV and CBA. Each component may have a length of 200, 210, 220, 230, 240, 250, 260, 270, 280, 290, 300, 310, 320, 330, 340, 350, 360, 370, 380, 381, 382, 383, 384, 385, 386, 387, 388, 389, 390, 400, 410, 420, 430, 440, 450, 460, 470, 480, 490, 500, 510, 520, 530, 540, 550, 560, 570, 580, 590, 600, 610, 620, 630, 640, 650, 660, 670, 680, 690, 700, 710, 720, 730, 740, 750, 760, 770, 780, 790, 800 or more than 800. Each component may have a length between 200-300, 200-400, 200-500, 200-600, 200-700, 200-800, 300-400, 300-500, 300-600, 300-700, 300-800, 400-500, 400-600, 400-700, 400-800, 500-600, 500-700, 500-800, 600-700, 600-800 or 700-800. As a non-limiting example, the promoter is a combination of a 382 nucleotide CMV-enhancer sequence and a 260 nucleotide CBA-promoter sequence.

[0343] In one embodiment, the vector genome comprises at least one element to enhance the target specificity and expression (See e.g., Powell et al. Viral Expression Cassette Elements to Enhance Transgene Target Specificity and Expression in Gene Therapy, 2015; the contents of which are herein incorporated by reference in its entirety). Non-limiting examples of elements to enhance the transgene target specificity and expression include promoters, endogenous miRNAs, post-transcriptional regulatory elements (PREs), polyadenylation (PolyA) signal sequences and upstream enhancers (USEs), CMV enhancers and introns.

[0344] In one embodiment, the vector genome comprises at least one element to enhance the target specificity and expression (See e.g., Powell et al. Viral Expression Cassette Elements to Enhance Transgene Target Specificity and Expression in Gene Therapy, 2015; the contents of which are herein incorporated by reference in its entirety) such as promoters.

[0345] Promoters for which promote expression in most tissues include, but are not limited to, human elongation factor 1α-subunit (EF1α), immediate-early cytomegalovirus (CMV), chicken β-actin (CBA) and its derivative CAG, the β glucuronidase (GUSB), or ubiquitin C (UBC). Tissue-specific expression elements can be used to restrict expression to certain cell types such as, but not limited to, nervous system promoters which can be used to restrict expression to neurons, astrocytes, or oligodendrocytes. Non-limiting example of tissue-specific expression elements for neurons include neuron-specific enolase (NSE), platelet-derived growth factor (PDGF), platelet-derived growth factor B-chain (PDGF-β), the synapsin (Syn), the methyl-CpG binding protein 2 (McCP2), CaMKII, mGluR2, NFL, NFH, nβ2, PPE, Enk and EAAT2 promoters. A non-limiting example of tissue-specific expression elements for astrocytes include the glial fibrillary acidic protein (GFAP) and EAAT2 promoters. A non-limiting example of a tissue-specific expression element for oligodendrocytes include the myelin basic protein (MBP) promoter.

[0346] In one embodiment, the vector genome comprises a ubiquitous promoter. Non-limiting examples of ubiquitous promoters include H1, U6, CMV, CBA (including derivatives CAG, CBh, etc.), EF-1α, PGK, UBC, GUSB (hGBp), and UCOE (promoter of HNRPA2B1-CBX3). Yu et al. (Molecular Pain 2011, 7:63; the contents of which are herein incorporated by reference in its entirety) evaluated the expression of eGFP under the CAG, EF1α, PGK and UBC promoters in rat DRG cells and primary DRG cells using lentiviral vectors and found that UBC showed weaker expression than the other 3 promoters and there was only 10-12% glia expression seen for all promoters. Soderblom et al. (E. Neuro 2015; the contents of which are herein incorporated by reference in its entirety) the expression of cGFP in AAV8 with CMV and UBC promoters and AAV2 with the CMV promoter after injection in the motor cortex. Intranasal administration of a plasmid containing a UBC or EF1α promoter showed a sustained airway expression greater than the expression with the CMV promoter (See e.g., Gill et al., Gene Therapy 2001, Vol. 8, 1539-1546; the contents of which are herein incorporated by reference in its entirety). Husain et al. (Gene Therapy 2009; the contents of which are herein incorporated by reference in its entirety) evaluated a HBH construct with a hGUSB promoter, a HSV-1LAT promoter and a NSE promoter and found that the HBH construct showed weaker expression than NSE in mice brain. Passini and Wolfe (J. Virol. 2001, 12382-12392, the contents of which are herein incorporated by reference in its entirety) evaluated the long-term effects of the HBH vector following an intraventricular injection in neonatal mice and found that there was sustained expression for at least 1 year. Low expression in all brain regions was found by Xu et al. (Gene Therapy 2001, 8, 1323-1332; the contents of which are herein incorporated by reference in its entirety) when NF-L and NF-H promoters were used as compared to the CMV-lacZ, CMV-luc, EF, GFAP, hENK, nAChR, PPE, PPE+wpre, NSE (0.3 kb), NSE (1.8 kb) and NSE (1.8 kb+wpre). Xu et al. found that the promoter activity in descending order was NSE (1.8 kb), EF, NSE (0.3 kb), GFAP, CMV, hENK, PPE, NFL and NFH. NFL is a 650 nucleotide promoter and NFH is a 920 nucleotide promoter which are both absent in the liver but NFH is abundant in the sensory proprioceptive neurons, brain and spinal cord and NFH is present in the heart. Scn8a is a 470 nucleotide promoter which expresses throughout the DRG, spinal cord and brain with particularly high expression seen in the hippocampal neurons and cerebellar Purkinje cells, cortex, thalamus and hypothalamus (See e.g., Drews et al. 2007 and Raymond et al. 2004; the contents of each of which are herein incorporated by reference in their entireties).

[0347] In one embodiment, the vector genome comprises an UBC promoter. The UBC promoter may have a size of 300-350 nucleotides. As a non-limiting example, the UBC promoter is 332 nucleotides.

[0348] In one embodiment, the vector genome comprises a GUSB promoter. The GUSB promoter may have a size of 350-400 nucleotides. As a non-limiting example, the GUSB promoter is 378 nucleotides. As a non-limiting example, the construct may be AAV-promoter-CMV/globin intron-modulatory polynucleotide-RBG, where the AAV may be self-complementary and the AAV may be the DJ serotype.

[0349] In one embodiment, the vector genome comprises a NFL promoter. The NFL promoter may have a size of 600-700 nucleotides. As a non-limiting example, the NFL promoter is 650 nucleotides. As a non-limiting example, the construct may be AAV-promoter-CMV/globin intron-modulatory polynucleotide-RBG, where the AAV may be self-complementary and the AAV may be the DJ serotype.

[0350] In one embodiment, the vector genome comprises a NFH promoter. The NFH promoter may have a size of 900-950 nucleotides. As a non-limiting example, the NFH promoter is 920 nucleotides. As a non-limiting example, the construct may be AAV-promoter-CMV/globin intron-modulatory polynucleotide-RBG, where the AAV may be self-complementary and the AAV may be the DJ serotype.

[0351] In one embodiment, the vector genome comprises a sen8a promoter. The scn8a promoter may have a size of 450-500 nucleotides. As a non-limiting example, the scn8a promoter is 470 nucleotides. As a non-limiting example, the construct may be AAV-promoter-CMV/globin intron-modulatory polynucleotide-RBG, where the AAV may be self-complementary and the AAV may be the DJ serotype.

[0352] In one embodiment, the vector genome comprises a Pol III promoter.

[0353] In one embodiment, the vector genome comprises a P1 promoter.

[0354] In one embodiment, the vector genome comprises a FXN promoter.

[0355] In one embodiment, the vector genome comprises a PGK promoter.

[0356] In one embodiment, the vector genome comprises a CBA promoter.

[0357] In one embodiment, the vector genome comprises a CMV promoter.

[0358] In one embodiment, the vector genome comprises a H1 promoter.

[0359] In one embodiment, the vector genome comprises a U6 promoter.

[0360] In one embodiment, the vector genome comprises a liver or a skeletal muscle promoter. Non-limiting examples of liver promoters include hAAT and TBG. Non-limiting examples of skeletal muscle promoters include Desmin, MCK and C5-12.

[0361] In one embodiment, the AAV vector comprises an enhancer element, a promoter and/or a 5′UTR intron. The enhancer may be, but is not limited to, a CMV enhancer, the promoter may be, but is not limited to, a CMV, CBA, UBC, GUSB, NSE, Synapsin, MeCP2, and GFAP promoter and the 5′UTR/intron may be, but is not limited to, SV40, and CBA-MVM. As a non-limiting example, the enhancer, promoter and/or intron used in combination may be: (1) CMV enhancer, CMV promoter, SV40 5′UTR intron; (2) CMV enhancer, CBA promoter, SV 40 5′UTR intron; (3) CMV enhancer, CBA promoter, CBA-MVM 5′UTR intron; (4) UBC promoter; (5) GUSB promoter; (6) NSE promoter; (7) Synapsin promoter; (8) MeCP2 promoter; (9) GFAP promoter, (10) H1 promoter; and (11) U6 promoter.

[0362] In one embodiment, the AAV vector has an engineered promoter.

### Viral Genome Component: Introns

[0363] In one embodiment, the vector genome comprises at least one element to enhance the transgene target specificity and expression (See e.g., Powell et al. Viral Expression Cassette Elements to Enhance Transgene Target Specificity and Expression in Gene Therapy, 2015; the contents of which are herein incorporated by reference in its entirety) such as an intron. Non-limiting examples of introns include, MVM (67-97 bps), F.IX truncated intron 1 (300 bps), β-globin SD/immunoglobulin heavy chain splice acceptor (250 bps), adenovirus splice donor/immunoglobin splice acceptor (500 bps), SV40 late splice donor/splice acceptor (19S/16S) (180 bps) and hybrid adenovirus splice donor/IgG splice acceptor (230 bps).

[0364] In one embodiment, the intron may be 100-500 nucleotides in length. The intron may have a length of 80, 90, 100, 110, 120, 130, 140, 150, 160, 170, 171, 172, 173, 174, 175, 176, 177, 178, 179, 180, 190, 200, 210, 220, 230, 240, 250, 260, 270, 280, 290, 300, 310, 320, 330, 340, 350, 360, 370, 380, 390, 400, 410, 420, 430, 440, 450, 460, 470, 480, 490 or 500. The promoter may have a length between 80-100, 80-120, 80-140, 80-160, 80-180, 80-200, 80-250, 80-300, 80-350, 80-400, 80-450, 80-500, 200-300, 200-400, 200-500, 300-400, 300-500, or 400-500.

[0365] In one embodiment, the AAV vector genome may comprise a promoter such as, but not limited to, CMV or U6. As a non-limiting example, the promoter for the AAV comprising the nucleic acid sequence for the siRNA molecules of the present invention is a CMV promoter. As another non-limiting example, the promoter for the AAV comprising the nucleic acid sequence for the siRNA molecules of the present invention is a U6 promoter.

[0366] In one embodiment, the AAV vector may comprise a CMV promoter.

[0367] In one embodiment, the AAV vector may comprise a U6 promoter.

[0368] In one embodiment, the AAV vector may comprise a CMV and a U6 promoter.

[0369] In one embodiment, the AAV vector may comprise a H1 promoter.

[0370] In one embodiment, the AAV vector may comprise a CBA promoter.

[0371] In one embodiment, the encoded siRNA molecule may be located downstream of a promoter in an expression vector such as, but not limited to, CMV, U6, H1, CBA or a CBA promoter with an intron such as SV40, betaGlobin or others known in the art. Further, the encoded siRNA molecule may also be located upstream of the polyadenylation sequence in an expression vector. As a non-limiting example, the encoded siRNA molecule may be located within 1, 2, 3, 4, 5, 6, 7, 8, 9, 10, 11, 12, 13, 14, 15, 16, 17, 18, 19, 20, 21, 22, 23, 24, 25, 26, 27, 28, 29, 30 or more than 30 nucleotides downstream from the promoter and/or upstream of the polyadenylation sequence in an expression vector. As another non-limiting example, the encoded siRNA molecule may be located within 1-5, 1-10, 1-15, 1-20, 1-25, 1-30, 5-10, 5-15, 5-20, 5-25, 5-30, 10-15, 10-20, 10-25, 10-30, 15-20, 15-25, 15-30, 20-25, 20-30 or 25-30 nucleotides downstream from the promoter and/or upstream of the polyadenylation sequence in an expression vector. As a non-limiting example, the encoded siRNA molecule may be located within the first 1%, 2%, 3%, 4%, 5%, 6%, 7%, 8%, 9%, 10%, 15%, 20%, 25% or more than 25% of the nucleotides downstream from the promoter and/or upstream of the polyadenylation sequence in an expression vector. As another non-limiting example, the encoded siRNA molecule may be located with the first 1-5%, 1-10%, 1-15%, 1-20%, 1-25%, 5-10%, 5-15%, 5-20%, 5-25%, 10-15%, 10-20%, 10-25%, 15-20%, 15-25%, or 20-25% downstream from the promoter and/or upstream of the polyadenylation sequence in an expression vector.

### Viral Genome Component: Polyadenylation Sequence

[0372] In one embodiment, the viral genome of the AAV particles of the present invention comprise at least one polyadenylation sequence. The viral genome of the AAV particle may comprise a polyadenylation sequence between the 3′ end of the payload coding sequence and the 5′ end of the 3′ITR.

[0373] In one embodiment, the polyadenylation sequence or “polyA sequence” may range from absent to about 500 nucleotides in length. The polyadenylation sequence may be, but is not limited to, 1, 2, 3, 4, 5, 6, 7, 8, 9, 10, 11, 12, 13, 14, 15, 16, 17, 18, 19, 20, 21, 22, 23, 24, 25, 26, 27, 28, 29, 30, 31, 32, 33, 34, 35, 36, 37, 38, 39, 40, 41, 42, 43, 44, 45, 46, 47, 48, 49, 50, 51, 52, 53, 54, 55, 56, 57, 58, 59, 60, 61, 62, 63, 64, 65, 66, 67, 68, 69, 70, 71, 72, 73, 74, 75, 76, 77, 78, 79, 80, 81, 82, 83, 84, 85, 86, 87, 88, 89, 90, 91, 92, 93, 94, 95, 96, 97, 98, 99, 100, 101, 102, 103, 104, 105, 106, 107, 108, 109, 110, 111, 112, 113, 114, 115, 116, 117, 118, 119, 120, 121, 122, 123, 124, 125, 126, 127, 128, 129, 130, 131, 132, 133, 134, 135, 136, 137, 138, 139, 140, 141, 142, 143, 144, 145, 146, 147, 148, 149, 150, 151, 152, 153, 154, 155, 156, 157, 158, 159, 160, 161, 162, 163, 164, 165, 166, 167, 168, 169, 170, 171, 172, 173, 174, 175, 176, 177, 178, 179, 180, 181, 182, 183, 184, 185, 186, 187, 188, 189, 190, 191, 192, 193, 194, 195, 196, 197, 198, 199, 200, 201, 202, 203, 204, 205, 206, 207, 208, 209, 210, 211, 212, 213, 214, 215, 216, 217, 218, 219, 220, 221, 222, 223, 224, 225, 226, 227, 228, 229, 230, 231, 232, 233, 234, 235, 236, 237, 238, 239, 240, 241, 242, 243, 244, 245, 246, 247, 248, 249, 250, 251, 252, 253, 254, 255, 256, 257, 258, 259, 260, 261, 262, 263, 264, 265, 266, 267, 268, 269, 270, 271, 272, 273, 274, 275, 276, 277, 278, 279, 280, 281, 282, 283, 284, 285, 286, 287, 288, 289, 290, 291, 292, 293, 294, 295, 296, 297, 298, 299, 300, 301, 302, 303, 304, 305, 306, 307, 308, 309, 310, 311, 312, 313, 314, 315, 316, 317, 318, 319, 320, 321, 322, 323, 324, 325, 326, 327, 328, 329, 330, 331, 332, 333, 334, 335, 336, 337, 338, 339, 340, 341, 342, 343, 344, 345, 346, 347, 348, 349, 350, 351, 352, 353, 354, 355, 356, 357, 358, 359, 360, 361, 362, 363, 364, 365, 366, 367, 368, 369, 370, 371, 372, 373, 374, 375, 376, 377, 378, 379, 380, 381, 382, 383, 384, 385, 386, 387, 388, 389, 390, 391, 392, 393, 394, 395, 396, 397, 398, 399, 400, 401, 402, 403, 404, 405, 406, 407, 408, 409, 410, 411, 412, 413, 414, 415, 416, 417, 418, 419, 420, 421, 422, 423, 424, 425, 426, 427, 428, 429, 430, 431, 432, 433, 434, 435, 436, 437, 438, 439, 440, 441, 442, 443, 444, 445, 446, 447, 448, 449, 450, 451, 452, 453, 454, 455, 456, 457, 458, 459, 460, 461, 462, 463, 464, 465, 466, 467, 468, 469, 470, 471, 472, 473, 474, 475, 476, 477, 478, 479, 480, 481, 482, 483, 484, 485, 486, 487, 488, 489, 490, 491, 492, 493, 494, 495, 496, 497, 498, 499, and 500 nucleotides in length.

[0374] In one embodiment, the polyadenylation sequence is 50-100 nucleotides in length.

[0375] In one embodiment, the polyadenylation sequence is 50-150 nucleotides in length.

[0376] In one embodiment, the polyadenylation sequence is 50-160 nucleotides in length.

[0377] In one embodiment, the polyadenylation sequence is 50-200 nucleotides in length.

[0378] In one embodiment, the polyadenylation sequence is 60-100 nucleotides in length. In one embodiment, the polyadenylation sequence is 60-150 nucleotides in length.

[0379] In one embodiment, the polyadenylation sequence is 60-160 nucleotides in length.

[0380] In one embodiment, the polyadenylation sequence is 60-200 nucleotides in length.

[0381] In one embodiment, the polyadenylation sequence is 70-100 nucleotides in length.

[0382] In one embodiment, the polyadenylation sequence is 70-150 nucleotides in length.

[0383] In one embodiment, the polyadenylation sequence is 70-160 nucleotides in length.

[0384] In one embodiment, the polyadenylation sequence is 70-200 nucleotides in length.

[0385] In one embodiment, the polyadenylation sequence is 80-100 nucleotides in length.

[0386] In one embodiment, the polyadenylation sequence is 80-150 nucleotides in length.

[0387] In one embodiment, the polyadenylation sequence is 80-160 nucleotides in length.

[0388] In one embodiment, the polyadenylation sequence is 80-200 nucleotides in length.

[0389] In one embodiment, the polyadenylation sequence is 90-100 nucleotides in length.

[0390] In one embodiment, the polyadenylation sequence is 90-150 nucleotides in length.

[0391] In one embodiment, the polyadenylation sequence is 90-160 nucleotides in length.

[0392] In one embodiment, the polyadenylation sequence is 90-200 nucleotides in length.

[0393] In one embodiment, the encoded siRNA molecule may be located upstream of the polyadenylation sequence in an expression vector. Further, the encoded siRNA molecule may be located downstream of a promoter such as, but not limited to, CMV, U6, H1, CBA or a CBA promoter with a SV40 or betaGlobin intron in an expression vector. As a non-limiting example, the encoded siRNA molecule may be located within 1, 2, 3, 4, 5, 6, 7, 8, 9, 10, 11, 12, 13, 14, 15, 16, 17, 18, 19, 20, 21, 22, 23, 24, 25, 26, 27, 28, 29, 30 or more than 30 nucleotides downstream from the promoter and/or upstream of the polyadenylation sequence in an expression vector. As another non-limiting example, the encoded siRNA molecule may be located within 1-5, 1-10, 1-15, 1-20, 1-25, 1-30, 5-10, 5-15, 5-20, 5-25, 5-30, 10-15, 10-20, 10-25, 10-30, 15-20, 15-25, 15-30, 20-25, 20-30 or 25-30 nucleotides downstream from the promoter and/or upstream of the polyadenylation sequence in an expression vector. As a non-limiting example, the encoded siRNA molecule may be located within the first 1%, 2%, 3%, 4%, 5%, 6%, 7%, 8%, 9%, 10%, 15%, 20%, 25% or more than 25% of the nucleotides downstream from the promoter and/or upstream of the polyadenylation sequence in an expression vector. As another non-limiting example, the encoded siRNA molecule may be located with the first 1-5%, 1-10%, 1-15%, 1-20%, 1-25%, 5-10%, 5-15%, 5-20%, 5-25%, 10-15%, 10-20%, 10-25%, 15-20%, 15-25%, or 20-25% downstream from the promoter and/or upstream of the polyadenylation sequence in an expression vector.

### Expression Vector

[0394] In one embodiment, an expression vector (e.g., AAV vector) may comprise at least one of the modulatory polynucleotides encoding at least one of the siRNA sequences or duplexes described herein.

[0395] In one embodiment, an expression vector may comprise, from ITR to ITR recited 5′ to 3′, an ITR, a promoter, an intron, a modulatory polynucleotide, a polyA sequence and an ITR.

### Genome Size

[0396] In one embodiment, the vector genome which comprises a nucleic acid sequence encoding the modulatory polynucleotides described herein may be single stranded or double stranded vector genome. The size of the vector genome may be small, medium, large or the maximum size. Additionally, the vector genome may comprise a promoter and a polyA tail.

[0397] In one embodiment, the vector genome which comprises a nucleic acid sequence encoding the modulatory polynucleotides described herein may be a small single stranded vector genome. A small single stranded vector genome may be 2.7 to 3.5 kb in size such as about 2.7, 2.8, 2.9, 3.0, 3.1, 3.2, 3.3, 3.4, and 3.5 kb in size. As a non-limiting example, the small single stranded vector genome may be 3.2 kb in size. Additionally, the vector genome may comprise a promoter and a polyA tail.

[0398] In one embodiment, the vector genome which comprises a nucleic acid sequence encoding the modulatory polynucleotides described herein may be a small double stranded vector genome. A small double stranded vector genome may be 1.3 to 1.7 kb in size such as about 1.3, 1.4, 1.5, 1.6, and 1.7 kb in size. As a non-limiting example, the small double stranded vector genome may be 1.6 kb in size. Additionally, the vector genome may comprise a promoter and a polyA tail.

[0399] In one embodiment, the vector genome which comprises a nucleic acid sequence encoding the modulatory polynucleotides described herein e.g., siRNA or dsRNA, may be a medium single stranded vector genome. A medium single stranded vector genome may be 3.6 to 4.3 kb in size such as about 3.6, 3.7, 3.8, 3.9, 4.0, 4.1, 4.2 and 4.3 kb in size. As a non-limiting example, the medium single stranded vector genome may be 4.0 kb in size. Additionally, the vector genome may comprise a promoter and a polyA tail.

[0400] In one embodiment, the vector genome which comprises a nucleic acid sequence encoding the modulatory polynucleotides described herein may be a medium double stranded vector genome. A medium double stranded vector genome may be 1.8 to 2.1 kb in size such as about 1.8, 1.9, 2.0, and 2.1 kb in size. As a non-limiting example, the medium double stranded vector genome may be 2.0 kb in size. Additionally, the vector genome may comprise a promoter and a polyA tail.

[0401] In one embodiment, the vector genome which comprises a nucleic acid sequence encoding the modulatory polynucleotides described herein may be a large single stranded vector genome. A large single stranded vector genome may be 4.4 to 6.0 kb in size such as about 4.4, 4.5, 4.6, 4.7, 4.8, 4.9, 5.0, 5.1, 5.2, 5.3, 5.4, 5.5, 5.6, 5.7, 5.8, 5.9 and 6.0 kb in size. As a non-limiting example, the large single stranded vector genome may be 4.7 kb in size. As another non-limiting example, the large single stranded vector genome may be 4.8 kb in size. As yet another non-limiting example, the large single stranded vector genome may be 6.0 kb in size. Additionally, the vector genome may comprise a promoter and a polyA tail.

[0402] In one embodiment, the vector genome which comprises a nucleic acid sequence encoding the modulatory polynucleotides described herein may be a large double stranded vector genome. A large double stranded vector genome may be 2.2 to 3.0 kb in size such as about 2.2, 2.3, 2.4, 2.5, 2.6, 2.7, 2.8, 2.9 and 3.0 kb in size. As a non-limiting example, the large double stranded vector genome may be 2.4 kb in size. Additionally, the vector genome may comprise a promoter and a polyA tail.

### Viral Production

[0403] The present disclosure provides a method for the generation of parvoviral particles, e.g. AAV particles, by viral genome replication in a viral replication cell comprising contacting the viral replication cell with an AAV polynucleotide or AAV genome.

[0404] The present disclosure provides a method for producing an AAV particle having enhanced (increased, improved) transduction efficiency comprising the steps of: 1) co-transfecting competent bacterial cells with a bacmid vector and either a viral construct vector and/or AAV payload construct vector, 2) isolating the resultant viral construct expression vector and AAV payload construct expression vector and separately transfecting viral replication cells, 3) isolating and purifying resultant payload and viral construct particles comprising viral construct expression vector or AAV payload construct expression vector, 4) co-infecting a viral replication cell with both the AAV payload and viral construct particles comprising viral construct expression vector or AAV payload construct expression vector, 5) harvesting and purifying the viral particle comprising a parvoviral genome.

[0405] In one embodiment, the present invention provides a method for producing an AAV particle comprising the steps of 1) simultaneously co-transfecting mammalian cells, such as, but not limited to HEK293 cells, with a payload region, a construct expressing rep and cap genes and a helper construct, 2) harvesting and purifying the AAV particle comprising a viral genome.

### Cells

[0406] The present disclosure provides a cell comprising an AAV polynucleotide and/or AAV genome.

[0407] Viral production disclosed herein describes processes and methods for producing AAV particles that contact a target cell to deliver a payload construct, e.g. a recombinant viral construct, which comprises a polynucleotide sequence encoding a payload molecule.

[0408] In one embodiment, the AAV particles may be produced in a viral replication cell that comprises an insect cell.

[0409] Growing conditions for insect cells in culture, and production of heterologous products in insect cells in culture are well-known in the art, see U.S. Pat. No. 6,204,059, the contents of which are herein incorporated by reference in their entirety.

[0410] Any insect cell which allows for replication of parvovirus and which can be maintained in culture can be used in accordance with the present invention. Cell lines may be used from Spodoptera frugiperda, including, but not limited to the Sf9 or Sf21 cell lines, Drosophila cell lines, or mosquito cell lines, such as Aedes albopictus derived cell lines. Use of insect cells for expression of heterologous proteins is well documented, as are methods of introducing nucleic acids, such as vectors, e.g., insect-cell compatible vectors, into such cells and methods of maintaining such cells in culture. See, for example, Methods in Molecular Biology, ed. Richard, Humana Press, NJ (1995); O'Reilly et al., Baculovirus Expression Vectors, A Laboratory Manual, Oxford Univ. Press (1994); Samulski et al., J. Vir. 63:3822-8 (1989); Kajigaya et al., Proc. Nat'l. Acad. Sci. USA 88:4646-50 (1991); Ruffing et al., J. Vir. 66:6922-30 (1992); Kimbauer et al., Vir. 219:37-44 (1996); Zhao et al., Vir. 272:382-93 (2000); and Samulski et al., U.S. Pat. No. 6,204,059, the contents of each of which is herein incorporated by reference in its entirety.

[0411] The viral replication cell may be selected from any biological organism, including prokaryotic (e.g., bacterial) cells, and eukaryotic cells, including, insect cells, yeast cells and mammalian cells. Viral replication cells may comprise mammalian cells such as A549, WEHI, 3T3, 10T1/2, BHK, MDCK, COS 1, COS 7, BSC 1, BSC 40, BMT 10, VERO. W138, HeLa, HEK293, Saos, C2C12, L cells, HT1080, HepG2 and primary fibroblast, hepatocyte and myoblast cells derived from mammals. Viral replication cells comprise cells derived from mammalian species including, but not limited to, human, monkey, mouse, rat, rabbit, and hamster or cell type, including but not limited to fibroblast, hepatocyte, tumor cell, cell line transformed cell, etc.

### Small Scale Production of AAV Particles

[0412] Viral production disclosed herein describes processes and methods for producing AAV particles that contact a target cell to deliver a payload, e.g. a recombinant viral construct, which comprises a polynucleotide sequence encoding a payload.

[0413] In one embodiment, the AAV particles may be produced in a viral replication cell that comprises a mammalian cell.

[0414] Viral replication cells commonly used for production of recombinant AAV particles include, but are not limited to 293 cells, COS cells, HeLa cells, KB cells, and other mammalian cell lines as described in U.S. Pat. Nos. 6,156,303, 5,387,484, 5,741,683, 5,691,176, and 5,688,676; U.S. patent application 2002/0081721, and International Patent Applications WO 00/47757, WO 00/24916, and WO 96/17947, the contents of each of which are herein incorporated by reference in their entireties.

[0415] In one embodiment, AAV particles are produced in mammalian-cells wherein all three VP proteins are expressed at a stoichiometry approaching 1:1:10 (VP1: VP2: VP3). The regulatory mechanisms that allow this controlled level of expression include the production of two mRNAs, one for VP1, and the other for VP2 and VP3, produced by differential splicing.

[0416] In another embodiment, AAV particles are produced in mammalian cells using a triple transfection method wherein a payload construct, parvoviral Rep and parvoviral Cap and a helper construct are comprised within three different constructs. The triple transfection method of the three components of AAV particle production may be utilized to produce small lots of virus for assays including transduction efficiency, target tissue (tropism) evaluation, and stability.

### Baculovirus

[0417] Particle production disclosed herein describes processes and methods for producing AAV particles that contact a target cell to deliver a payload construct which comprises a polynucleotide sequence encoding a payload.

[0418] Briefly, the viral construct vector and the AAV payload construct vector are each incorporated by a transposon donor/acceptor system into a bacmid, also known as a baculovirus plasmid, by standard molecular biology techniques known and performed by a person skilled in the art. Transfection of separate viral replication cell populations produces two baculoviruses, one that comprises the viral construct expression vector, and another that comprises the AAV payload construct expression vector. The two baculoviruses may be used to infect a single viral replication cell population for production of AAV particles.

[0419] Baculovirus expression vectors for producing viral particles in insect cells, including but not limited to Spodoptera frugiperda (Sf9) cells, provide high titers of viral particle product. Recombinant baculovirus encoding the viral construct expression vector and AAV payload construct expression vector initiates a productive infection of viral replicating cells. Infectious baculovirus particles released from the primary infection secondarily infect additional cells in the culture, exponentially infecting the entire cell culture population in a number of infection cycles that is a function of the initial multiplicity of infection, see Urabe, M. et al., J Virol. 2006 February; 80 (4): 1874-85, the contents of which are herein incorporated by reference in their entirety.

[0420] Production of AAV particles with baculovirus in an insect cell system may address known baculovirus genetic and physical instability. In one embodiment, the production system addresses baculovirus instability over multiple passages by utilizing a titerless infected-cells preservation and scale-up system. Small scale seed cultures of viral producing cells are transfected with viral expression constructs encoding the structural, non-structural, components of the viral particle. Baculovirus-infected viral producing cells are harvested into aliquots that may be cryopreserved in liquid nitrogen; the aliquots retain viability and infectivity for infection of large scale viral producing cell culture Wasilko D J et al., Protein Expr Purif. 2009 June; 65 (2): 122-32, the contents of which are herein incorporated by reference in their entirety.

[0421] A genetically stable baculovirus may be used to produce source of the one or more of the components for producing AAV particles in invertebrate cells. In one embodiment, defective baculovirus expression vectors may be maintained episomally in insect cells. In such an embodiment the bacmid vector is engineered with replication control elements, including but not limited to promoters, enhancers, and/or cell-cycle regulated replication elements.

[0422] In one embodiment, baculoviruses may be engineered with a (non-) selectable marker for recombination into the chitinase/cathepsin locus. The chia/v-cath locus is non-essential for propagating baculovirus in tissue culture, and the V-cath (EC 3.4.22.50) is a cysteine endoprotease that is most active on Arg-Arg dipeptide containing substrates. The Arg-Arg dipeptide is present in densovirus and parvovirus capsid structural proteins but infrequently occurs in dependovirus VP1.

[0423] In one embodiment, stable viral replication cells permissive for baculovirus infection are engineered with at least one stable integrated copy of any of the elements necessary for AAV replication and viral particle production including, but not limited to, the entire AAV genome, Rep and Cap genes, Rep genes, Cap genes, each Rep protein as a separate transcription cassette, each VP protein as a separate transcription cassette, the AAP (assembly activation protein), or at least one of the baculovirus helper genes with native or non-native promoters.

### Large-Scale Production

[0424] In some embodiments, AAV particle production may be modified to increase the scale of production. Large scale viral production methods according to the present disclosure may include any of those taught in U.S. Pat. Nos. 5,756,283, 6,258,595, 6,261,551, 6,270,996, 6,281,010, 6,365,394, 6,475,769, 6,482,634, 6,485,966, 6,943,019, 6,953,690, 7,022,519, 7,238,526, 7,291,498 and 7,491,508 or International Publication Nos. WO1996039530, WO1998010088, WO1999014354, WO1999015685, WO1999047691, WO2000055342, WO2000075353 and WO2001023597, the contents of each of which are herein incorporated by reference in their entirety. Methods of increasing viral particle production scale typically comprise increasing the number of viral replication cells. In some embodiments, viral replication cells comprise adherent cells. To increase the scale of viral particle production by adherent viral replication cells, larger cell culture surfaces are required. In some cases, large-scale production methods comprise the use of roller bottles to increase cell culture surfaces. Other cell culture substrates with increased surface areas are known in the art. Examples of additional adherent cell culture products with increased surface areas include, but are not limited to CELLSTACK®, CELLCUBE® (Corning Corp., Corning, NY) and NUNC™ CELL FACTORY™ (Thermo Scientific, Waltham, MA.) In some cases, large-scale adherent cell surfaces may comprise from about 1,000 cm² to about 100,000 cm². In some cases, large-scale adherent cell cultures may comprise from about 10⁷ to about 10⁹ cells, from about 10⁸ to about 10¹⁰ cells, from about 10⁹ to about 10¹² cells or at least 10¹² cells. In some cases, large-scale adherent cultures may produce from about 10⁹ to about 10¹², from about 10¹⁰ to about 10¹³, from about 10¹¹ to about 10¹⁴, from about 10¹² to about 10¹⁵ or at least 10¹⁵ viral particles.

[0425] In some embodiments, large-scale viral production methods of the present disclosure may comprise the use of suspension cell cultures. Suspension cell culture allows for significantly increased numbers of cells. Typically, the number of adherent cells that can be grown on about 10-50 cm² of surface area can be grown in about 1 cm³ volume in suspension.

[0426] Transfection of replication cells in large-scale culture formats may be carried out according to any methods known in the art. For large-scale adherent cell cultures, transfection methods may include, but are not limited to the use of inorganic compounds (e.g. calcium phosphate), organic compounds [e.g. polyethyleneimine (PEI)] or the use of non-chemical methods (e.g. electroporation.) With cells grown in suspension, transfection methods may include, but are not limited to the use of calcium phosphate and the use of PEI. In some cases, transfection of large scale suspension cultures may be carried out according to the section entitled “Transfection Procedure” described in Feng, L. et al., 2008. Biotechnol Appl. Biochem. 50:121-32, the contents of which are herein incorporated by reference in their entirety. According to such embodiments, PEI-DNA complexes may be formed for introduction of plasmids to be transfected. In some cases, cells being transfected with PEI-DNA complexes may be ‘shocked’ prior to transfection. This comprises lowering cell culture temperatures to 4° C. for a period of about 1 hour. In some cases, cell cultures may be shocked for a period of from about 10 minutes to about 5 hours. In some cases, cell cultures may be shocked at a temperature of from about 0° C. to about 20° C.

[0427] In some cases, transfections may include one or more vectors for expression of an RNA effector molecule to reduce expression of nucleic acids from one or more AAV payload construct. Such methods may enhance the production of viral particles by reducing cellular resources wasted on expressing payload constructs. In some cases, such methods may be carried according to those taught in US Publication No. US2014/0099666, the contents of which are herein incorporated by reference in their entirety.

### Bioreactors

[0428] In some embodiments, cell culture bioreactors may be used for large scale viral production. In some cases, bioreactors comprise stirred tank reactors. Such reactors generally comprise a vessel, typically cylindrical in shape, with a stirrer (e.g. impeller.) In some embodiments, such bioreactor vessels may be placed within a water jacket to control vessel temperature and/or to minimize effects from ambient temperature changes. Bioreactor vessel volume may range in size from about 500 ml to about 2 L, from about 1 L to about 5 L, from about 2.5 L to about 20 L, from about 10 L to about 50 L, from about 25 L to about 100 L, from about 75 L to about 500 L, from about 250 L to about 2,000 L, from about 1,000 L to about 10,000 L, from about 5,000 L to about 50,000 L or at least 50,000 L. Vessel bottoms may be rounded or flat. In some cases, animal cell cultures may be maintained in bioreactors with rounded vessel bottoms.

[0429] In some cases, bioreactor vessels may be warmed through the use of a thermocirculator. Thermocirculators pump heated water around water jackets. In some cases, heated water may be pumped through pipes (e.g. coiled pipes) that are present within bioreactor vessels. In some cases, warm air may be circulated around bioreactors, including, but not limited to air space directly above culture medium. Additionally, pH and CO₂ levels may be maintained to optimize cell viability.

[0430] In some cases, bioreactors may comprise hollow-fiber reactors. Hollow-fiber bioreactors may support the culture of both anchorage dependent and anchorage independent cells. Further bioreactors may include, but are not limited to packed-bed or fixed-bed bioreactors. Such bioreactors may comprise vessels with glass beads for adherent cell attachment. Further packed-bed reactors may comprise ceramic beads.

[0431] In some cases, viral particles are produced through the use of a disposable bioreactor. In some embodiments, such bioreactors may include WAVE™ disposable bioreactors.

[0432] In some embodiments, AAV particle production in animal cell bioreactor cultures may be carried out according to the methods taught in U.S. Pat. Nos. 5,064,764, 6,194,191, 6,566,118, 8,137,948 or US Patent Application No. US2011/0229971, the contents of each of which are herein incorporated by reference in their entirety.

### Cell Lysis

[0433] Cells of the invention, including, but not limited to viral production cells, may be subjected to cell lysis according to any methods known in the art. Cell lysis may be carried out to obtain one or more agents (e.g. viral particles) present within any cells of the invention. In some embodiments, cell lysis may be carried out according to any of the methods listed in U.S. Pat. Nos. 7,326,555, 7,579,181, 7,048,920, 6,410,300, 6,436,394, 7,732,129, 7,510,875, 7,445,930, 6,726,907, 6,194,191, 7,125,706, 6,995,006, 6,676,935, 7,968,333, 5,756,283, 6,258,595, 6,261,551, 6,270,996, 6,281,010, 6,365,394, 6,475,769, 6,482,634, 6,485,966, 6,943,019, 6,953,690, 7,022,519, 7,238,526, 7,291,498 and 7,491,508 or International Publication Nos. WO1996039530, WO1998010088, WO1999014354, WO1999015685, WO1999047691, WO2000055342, WO2000075353 and WO2001023597, the contents of each of which are herein incorporated by reference in their entirety. Cell lysis methods may be chemical or mechanical. Chemical cell lysis typically comprises contacting one or more cells with one or more lysis agent. Mechanical lysis typically comprises subjecting one or more cells to one or more lysis condition and/or one or more lysis force.

[0434] In some embodiments, chemical lysis may be used to lyse cells. As used herein, the term “lysis agent” refers to any agent that may aid in the disruption of a cell. In some cases, lysis agents are introduced in solutions, termed lysis solutions or lysis buffers. As used herein, the term “lysis solution” refers to a solution (typically aqueous) comprising one or more lysis agent. In addition to lysis agents, lysis solutions may include one or more buffering agents, solubilizing agents, surfactants, preservatives, cryoprotectants, enzymes, enzyme inhibitors and/or chelators. Lysis buffers are lysis solutions comprising one or more buffering agent. Additional components of lysis solutions may include one or more solubilizing agent. As used herein, the term “solubilizing agent” refers to a compound that enhances the solubility of one or more components of a solution and/or the solubility of one or more entities to which solutions are applied. In some cases, solubilizing agents enhance protein solubility. In some cases, solubilizing agents are selected based on their ability to enhance protein solubility while maintaining protein conformation and/or activity.

[0435] Exemplary lysis agents may include any of those described in U.S. Pat. Nos. 8,685,734, 7,901,921, 7,732,129, 7,223,585, 7,125,706, 8,236,495, 8,110,351, 7,419,956, 7,300,797, 6,699,706 and 6,143,567, the contents of each of which are herein incorporated by reference in their entirety. In some cases, lysis agents may be selected from lysis salts, amphoteric agents, cationic agents, ionic detergents and non-ionic detergents. Lysis salts may include, but are not limited to sodium chloride (NaCl) and potassium chloride (KCl.) Further lysis salts may include any of those described in U.S. Pat. Nos. 8,614,101, 7,326,555, 7,579,181, 7,048,920, 6,410,300, 6,436,394, 7,732,129, 7,510,875, 7,445,930, 6,726,907, 6,194,191, 7,125,706, 6,995,006, 6,676,935 and 7,968,333, the contents of each of which are herein incorporated by reference in their entirety. Concentrations of salts may be increased or decreased to obtain an effective concentration for rupture of cell membranes. Amphoteric agents, as referred to herein, are compounds capable of reacting as an acid or a base. Amphoteric agents may include, but are not limited to lysophosphatidylcholine, 3-((3-Cholamidopropyl) dimethylammonium)-1-propanesulfonate (CHAPS), ZWITTERGENT® and the like. Cationic agents may include, but are not limited to cetyltrimethylammonium bromide (C (16) TAB) and Benzalkonium chloride. Lysis agents comprising detergents may include ionic detergents or non-ionic detergents. Detergents may function to break apart or dissolve cell structures including, but not limited to cell membranes, cell walls, lipids, carbohydrates, lipoproteins and glycoproteins. Exemplary ionic detergents include any of those taught in U.S. Pat. Nos. 7,625,570 and 6,593,123 or US Publication No. US2014/0087361, the contents of each of which are herein incorporated by reference in their entirety. Some ionic detergents may include, but are not limited to sodium dodecyl sulfate (SDS), cholate and deoxycholate. In some cases, ionic detergents may be included in lysis solutions as a solubilizing agent. Non-ionic detergents may include, but are not limited to octylglucoside, digitonin, lubrol, C12E8, TWEEN®-20, TWEEN®-80, Triton X-100 and Noniodet P-40. Non-ionic detergents are typically weaker lysis agents, but may be included as solubilizing agents for solubilizing cellular and/or viral proteins. Further lysis agents may include enzymes and urea. In some cases, one or more lysis agents may be combined in a lysis solution in order to enhance one or more of cell lysis and protein solubility. In some cases, enzyme inhibitors may be included in lysis solutions in order to prevent proteolysis that may be triggered by cell membrane disruption.

[0436] In some embodiments, mechanical cell lysis is carried out. Mechanical cell lysis methods may include the use of one or more lysis condition and/or one or more lysis force. As used herein, the term “lysis condition” refers to a state or circumstance that promotes cellular disruption. Lysis conditions may comprise certain temperatures, pressures, osmotic purity, salinity and the like. In some cases, lysis conditions comprise increased or decreased temperatures. According to some embodiments, lysis conditions comprise changes in temperature to promote cellular disruption. Cell lysis carried out according to such embodiments may include freeze-thaw lysis. As used herein, the term “freeze-thaw lysis” refers to cellular lysis in which a cell solution is subjected to one or more freeze-thaw cycle. According to freeze-thaw lysis methods, cells in solution are frozen to induce a mechanical disruption of cellular membranes caused by the formation and expansion of ice crystals. Cell solutions used according freeze-thaw lysis methods, may further comprise one or more lysis agents, solubilizing agents, buffering agents, cryoprotectants, surfactants, preservatives, enzymes, enzyme inhibitors and/or chelators. Once cell solutions subjected to freezing are thawed, such components may enhance the recovery of desired cellular products. In some cases, one or more cryoprotectants are included in cell solutions undergoing freeze-thaw lysis. As used herein, the term “cryoprotectant” refers to an agent used to protect one or more substance from damage due to freezing. Cryoprotectants may include any of those taught in US Publication No. US2013/0323302 or U.S. Pat. Nos. 6,503,888, 6,180,613, 7,888,096, 7,091,030, the contents of each of which are herein incorporated by reference in their entirety. In some cases, cryoprotectants may include, but are not limited to dimethyl sulfoxide, 1,2-propanediol, 2,3-butanediol, formamide, glycerol, ethylene glycol, 1,3-propanediol and n-dimethyl formamide, polyvinylpyrrolidone, hydroxyethyl starch, agarose, dextrans, inositol, glucose, hydroxyethylstarch, lactose, sorbitol, methyl glucose, sucrose and urea. In some embodiments, freeze-thaw lysis may be carried out according to any of the methods described in U.S. Pat. No. 7,704,721, the contents of which are herein incorporated by reference in their entirety.

[0437] As used herein, the term “lysis force” refers to a physical activity used to disrupt a cell. Lysis forces may include, but are not limited to mechanical forces, sonic forces, gravitational forces, optical forces, electrical forces and the like. Cell lysis carried out by mechanical force is referred to herein as “mechanical lysis.” Mechanical forces that may be used according to mechanical lysis may include high shear fluid forces. According to such methods of mechanical lysis, a microfluidizer may be used. Microfluidizers typically comprise an inlet reservoir where cell solutions may be applied. Cell solutions may then be pumped into an interaction chamber via a pump (e.g. high-pressure pump) at high speed and/or pressure to produce shear fluid forces. Resulting lysates may then be collected in one or more output reservoir. Pump speed and/or pressure may be adjusted to modulate cell lysis and enhance recovery of products (e.g. viral particles.) Other mechanical lysis methods may include physical disruption of cells by scraping.

[0438] Cell lysis methods may be selected based on the cell culture format of cells to be lysed. For example, with adherent cell cultures, some chemical and mechanical lysis methods may be used. Such mechanical lysis methods may include freeze-thaw lysis or scraping. In another example, chemical lysis of adherent cell cultures may be carried out through incubation with lysis solutions comprising surfactant, such as Triton-X-100. In some cases, cell lysates generated from adherent cell cultures may be treated with one more nuclease to lower the viscosity of the lysates caused by liberated DNA.

[0439] In one embodiment, a method for harvesting AAV particles without lysis may be used for efficient and scalable AAV particle production. In a non-limiting example, AAV particles may be produced by culturing an AAV particle lacking a heparin binding site, thereby allowing the AAV particle to pass into the supernatant, in a cell culture, collecting supernatant from the culture; and isolating the AAV particle from the supernatant, as described in U.S. patent application No. 20090275107, the contents of which are incorporated herein by reference in their entirety.

### Clarification

[0440] Cell lysates comprising viral particles may be subjected to clarification. Clarification refers to initial steps taken in purification of viral particles from cell lysates. Clarification serves to prepare lysates for further purification by removing larger, insoluble debris. Clarification steps may include, but are not limited to centrifugation and filtration. During clarification, centrifugation may be carried out at low speeds to remove larger debris only. Similarly, filtration may be carried out using filters with larger pore sizes so that only larger debris is removed. In some cases, tangential flow filtration may be used during clarification. Objectives of viral clarification include high throughput processing of cell lysates and to optimize ultimate viral recovery. Advantages of including a clarification step include scalability for processing of larger volumes of lysate. In some embodiments, clarification may be carried out according to any of the methods presented in U.S. Pat. Nos. 8,524,446, 5,756,283, 6,258,595, 6,261,551, 6,270,996, 6,281,010, 6,365,394, 6,475,769, 6,482,634, 6,485,966, 6,943,019, 6,953,690, 7,022,519, 7,238,526, 7,291,498, 7,491,508, US Publication Nos. US2013/0045186, US2011/0263027, US2011/0151434, US2003/0138772, and International Publication Nos. WO2002012455, WO1996039530, WO1998010088, WO1999014354, WO1999015685, WO1999047691, WO2000055342, WO2000075353 and WO2001023597, the contents of each of which are herein incorporated by reference in their entirety.

[0441] Methods of cell lysate clarification by filtration are well understood in the art and may be carried out according to a variety of available methods including, but not limited to passive filtration and flow filtration. Filters used may comprise a variety of materials and pore sizes. For example, cell lysate filters may comprise pore sizes of from about 1 μM to about 5 μM, from about 0.5 μM to about 2 μM, from about 0.1 μM to about 1 μM, from about 0.05 UM to about 0.05 μM and from about 0.001 μM to about 0.1 μM. Exemplary pore sizes for cell lysate filters may include, but are not limited to, 2.0, 1.9, 1.8, 1.7, 1.6, 1.5, 1.4, 1.3, 1.2, 1.1, 1, 0.9, 0.8, 0.7, 0.6, 0.5, 0.4, 0.3, 0.2, 0.1, 0.95, 0.9, 0.85, 0.8, 0.75, 0.7, 0.65, 0.6, 0.55, 0.5, 0.45, 0.4, 0.35, 0.3, 0.25, 0.2, 0.15, 0.1, 0.05, 0.22, 0.21, 0.20, 0.19, 0.18, 0.17, 0.16, 0.15, 0.14, 0.13, 0.12, 0.11, 0.1, 0.09, 0.08, 0.07, 0.06, 0.05, 0.04, 0.03, 0.02, 0.01, 0.02, 0.019, 0.018, 0.017, 0.016, 0.015, 0.014, 0.013, 0.012, 0.011, 0.01, 0.009, 0.008, 0.007, 0.006, 0.005, 0.004, 0.003, 0.002, 0.001 and 0.001 μM. In one embodiment, clarification may comprise filtration through a filter with 2.0 μM pore size to remove large debris, followed by passage through a filter with 0.45 μM pore size to remove intact cells.

[0442] Filter materials may be composed of a variety of materials. Such materials may include, but are not limited to polymeric materials and metal materials (e.g. sintered metal and pored aluminum.) Exemplary materials may include, but are not limited to nylon, cellulose materials (e.g. cellulose acetate), polyvinylidene fluoride (PVDF), polyethersulfone, polyamide, polysulfone, polypropylene, and polyethylene terephthalate. In some cases, filters useful for clarification of cell lysates may include, but are not limited to ULTIPLEAT PROFILE™ filters (Pall Corporation, Port Washington, NY), SUPOR™ membrane filters (Pall Corporation, Port Washington, NY)

[0443] In some cases, flow filtration may be carried out to increase filtration speed and/or effectiveness. In some cases, flow filtration may comprise vacuum filtration. According to such methods, a vacuum is created on the side of the filter opposite that of cell lysate to be filtered. In some cases, cell lysates may be passed through filters by centrifugal forces. In some cases, a pump is used to force cell lysate through clarification filters. Flow rate of cell lysate through one or more filters may be modulated by adjusting one of channel size and/or fluid pressure.

[0444] According to some embodiments, cell lysates may be clarified by centrifugation. Centrifugation may be used to pellet insoluble particles in the lysate. During clarification, centrifugation strength [expressed in terms of gravitational units (g), which represents multiples of standard gravitational force] may be lower than in subsequent purification steps. In some cases, centrifugation may be carried out on cell lysates at from about 200 g to about 800 g, from about 500 g to about 1500 g, from about 1000 g to about 5000 g, from about 1200 g to about 10000 g or from about 8000 g to about 15000 g. In some embodiments, cell lysate centrifugation is carried out at 8000 g for 15 minutes. In some cases, density gradient centrifugation may be carried out in order to partition particulates in the cell lysate by sedimentation rate. Gradients used according to methods of the present disclosure may include, but are not limited to cesium chloride gradients and iodixanol step gradients.

### Purification: Chromatography

[0445] In some cases, AAV particles may be purified from clarified cell lysates by one or more methods of chromatography. Chromatography refers to any number of methods known in the art for separating out one or more elements from a mixture. Such methods may include, but are not limited to ion exchange chromatography (e.g. cation exchange chromatography and anion exchange chromatography), immunoaffinity chromatography and size-exclusion chromatography. In some embodiments, methods of viral chromatography may include any of those taught in U.S. Pat. Nos. 5,756,283, 6,258,595, 6,261,551, 6,270,996, 6,281,010, 6,365,394, 6,475,769, 6,482,634, 6,485,966, 6,943,019, 6,953,690, 7,022,519, 7,238,526, 7,291,498 and 7,491,508 or International Publication Nos. WO1996039530, WO1998010088, WO1999014354, WO1999015685, WO1999047691, WO2000055342, WO2000075353 and WO2001023597, the contents of each of which are herein incorporated by reference in their entirety.

[0446] In some embodiments, ion exchange chromatography may be used to isolate viral particles. Ion exchange chromatography is used to bind viral particles based on charge-charge interactions between capsid proteins and charged sites present on a stationary phase, typically a column through which viral preparations (e.g. clarified lysates) are passed. After application of viral preparations, bound viral particles may then be cluted by applying an elution solution to disrupt the charge-charge interactions. Elution solutions may be optimized by adjusting salt concentration and/or pH to enhance recovery of bound viral particles. Depending on the charge of viral capsids being isolated, cation or anion exchange chromatography methods may be selected. Methods of ion exchange chromatography may include, but are not limited to any of those taught in U.S. Pat. Nos. 7,419,817, 6,143,548, 7,094,604, 6,593,123, 7,015,026 and 8,137,948, the contents of each of which are herein incorporated by reference in their entirety.

[0447] In some embodiments, immunoaffinity chromatography may be used. Immunoaffinity chromatography is a form of chromatography that utilizes one or more immune compounds (e.g. antibodies or antibody-related structures) to retain viral particles. Immune compounds may bind specifically to one or more structures on viral particle surfaces, including, but not limited to one or more viral coat protein. In some cases, immune compounds may be specific for a particular viral variant. In some cases, immune compounds may bind to multiple viral variants. In some embodiments, immune compounds may include recombinant single-chain antibodies. Such recombinant single chain antibodies may include those described in Smith, R. H. et al., 2009. Mol. Ther. 17 (11): 1888-96, the contents of which are herein incorporated by reference in their entirety. Such immune compounds are capable of binding to several AAV capsid variants, including, but not limited to AAV1, AAV2, AAV6 and AAV8.

[0448] In some embodiments, size-exclusion chromatography (SEC) may be used. SEC may comprise the use of a gel to separate particles according to size. In viral particle purification, SEC filtration is sometimes referred to as “polishing.” In some cases, SEC may be carried out to generate a final product that is near-homogenous. Such final products may in some cases be used in pre-clinical studies and/or clinical studies (Kotin, R. M. 2011. Human Molecular Genetics. 20 (1): R2-R6, the contents of which are herein incorporated by reference in their entirety.) In some cases, SEC may be carried out according to any of the methods taught in U.S. Pat. Nos. 6,143,548, 7,015,026, 8,476,418, 6,410,300, 8,476,418, 7,419,817, 7,094,604, 6,593,123, and 8,137,948, the contents of each of which are herein incorporated by reference in their entirety.

[0449] In one embodiment, the compositions comprising at least one AAV particle may be isolated or purified using the methods described in U.S. Pat. No. 6,146,874, the contents of which are herein incorporated by reference in its entirety.

[0450] In one embodiment, the compositions comprising at least one AAV particle may be isolated or purified using the methods described in U.S. Pat. No. 6,660,514, the contents of which are herein incorporated by reference in its entirety.

[0451] In one embodiment, the compositions comprising at least one AAV particle may be isolated or purified using the methods described in U.S. Pat. No. 8,283,151, the contents of which are herein incorporated by reference in its entirety.

[0452] In one embodiment, the compositions comprising at least one AAV particle may be isolated or purified using the methods described in U.S. Pat. No. 8,524,446, the contents of which are herein incorporated by reference in its entirety.

### II. FORMULATION AND DELIVERY

### Pharmaceutical Compositions and Formulation

[0453] In addition to the pharmaceutical compositions (vectors, e.g., AAV vectors, comprising a nucleic acid sequence encoding the siRNA molecules), provided herein are pharmaceutical compositions which are suitable for administration to humans, it will be understood by the skilled artisan that such compositions are generally suitable for administration to any other animal, e.g., to non-human animals, e.g. non-human mammals. Modification of pharmaceutical compositions suitable for administration to humans in order to render the compositions suitable for administration to various animals is well understood, and the ordinarily skilled veterinary pharmacologist can design and/or perform such modification with merely ordinary, if any, experimentation. Subjects to which administration of the pharmaceutical compositions is contemplated include, but are not limited to, humans and/or other primates; mammals, including commercially relevant mammals such as cattle, pigs, horses, sheep, cats, dogs, mice, and/or rats; and/or birds, including commercially relevant birds such as poultry, chickens, ducks, geese, and/or turkeys.

[0454] In some embodiments, compositions are administered to humans, human patients or subjects. For the purposes of the present disclosure, the phrase “active ingredient” generally refers either to the synthetic siRNA duplexes, the vector, e.g., AAV vector, encoding the siRNA duplexes, or to the siRNA molecule delivered by a vector as described herein.

[0455] Formulations of the pharmaceutical compositions described herein may be prepared by any method known or hereafter developed in the art of pharmacology. In general, such preparatory methods include the step of bringing the active ingredient into association with an excipient and/or one or more other accessory ingredients, and then, if necessary and/or desirable, dividing, shaping and/or packaging the product into a desired single- or multi-dose unit.

[0456] Relative amounts of the active ingredient, the pharmaceutically acceptable excipient, and/or any additional ingredients in a pharmaceutical composition in accordance with the invention will vary, depending upon the identity, size, and/or condition of the subject treated and further depending upon the route by which the composition is to be administered.

[0457] The vectors e.g., AAV vectors, comprising the nucleic acid sequence encoding the siRNA molecules of the present invention can be formulated using one or more excipients to: (1) increase stability; (2) increase cell transfection or transduction; (3) permit the sustained or delayed release; or (4) alter the biodistribution (e.g., target the viral vector to specific tissues or cell types such as brain and neurons).

[0458] Formulations of the present invention can include, without limitation, saline, lipidoids, liposomes, lipid nanoparticles, polymers, lipoplexes, core-shell nanoparticles, peptides, proteins, cells transfected with viral vectors (e.g., for transplantation into a subject), nanoparticle mimics and combinations thereof. Further, the viral vectors of the present invention may be formulated using self-assembled nucleic acid nanoparticles.

[0459] Formulations of the pharmaceutical compositions described herein may be prepared by any method known or hereafter developed in the art of pharmacology. In general, such preparatory methods include the step of associating the active ingredient with an excipient and/or one or more other accessory ingredients.

[0460] A pharmaceutical composition in accordance with the present disclosure may be prepared, packaged, and/or sold in bulk, as a single unit dose, and/or as a plurality of single unit doses. As used herein, a “unit dose” refers to a discrete amount of the pharmaceutical composition comprising a predetermined amount of the active ingredient. The amount of the active ingredient is generally equal to the dosage of the active ingredient which would be administered to a subject and/or a convenient fraction of such a dosage such as, for example, one-half or one-third of such a dosage.

[0461] Relative amounts of the active ingredient, the pharmaceutically acceptable excipient, and/or any additional ingredients in a pharmaceutical composition in accordance with the present disclosure may vary, depending upon the identity, size, and/or condition of the subject being treated and further depending upon the route by which the composition is to be administered. For example, the composition may comprise between 0.1% and 99% (w/w) of the active ingredient. By way of example, the composition may comprise between 0.1% and 100%, e.g., between 0.5 and 50%, between 1-30%, between 5-80%, at least 80% (w/w) active ingredient.

[0462] In some embodiments, a pharmaceutically acceptable excipient may be at least 95%, at least 96%, at least 97%, at least 98%, at least 99%, or 100% pure. In some embodiments, an excipient is approved for use for humans and for veterinary use. In some embodiments, an excipient may be approved by United States Food and Drug Administration. In some embodiments, an excipient may be of pharmaceutical grade. In some embodiments, an excipient may meet the standards of the United States Pharmacopoeia (USP), the European Pharmacopocia (EP), the British Pharmacopoeia, and/or the International Pharmacopocia.

[0463] Excipients, which, as used herein, includes, but is not limited to, any and all solvents, dispersion media, diluents, or other liquid vehicles, dispersion or suspension aids, surface active agents, isotonic agents, thickening or emulsifying agents, preservatives, and the like, as suited to the particular dosage form desired. Various excipients for formulating pharmaceutical compositions and techniques for preparing the composition are known in the art (see Remington: The Science and Practice of Pharmacy, 21^{st} Edition, A. R. Gennaro, Lippincott, Williams & Wilkins, Baltimore, MD, 2006; incorporated herein by reference in its entirety). The use of a conventional excipient medium may be contemplated within the scope of the present disclosure, except insofar as any conventional excipient medium may be incompatible with a substance or its derivatives, such as by producing any undesirable biological effect or otherwise interacting in a deleterious manner with any other component(s) of the pharmaceutical composition.

[0464] Exemplary diluents include, but are not limited to, calcium carbonate, sodium carbonate, calcium phosphate, dicalcium phosphate, calcium sulfate, calcium hydrogen phosphate, sodium phosphate lactose, sucrose, cellulose, microcrystalline cellulose, kaolin, mannitol, sorbitol, inositol, sodium chloride, dry starch, cornstarch, powdered sugar, etc., and/or combinations thereof.

[0465] In some embodiments, the formulations may comprise at least one inactive ingredient. As used herein, the term “inactive ingredient” refers to one or more inactive agents included in formulations. In some embodiments, all, none or some of the inactive ingredients which may be used in the formulations of the present invention may be approved by the US Food and Drug Administration (FDA).

[0466] Formulations of vectors comprising the nucleic acid sequence for the siRNA molecules of the present invention may include cations or anions. In one embodiment, the formulations include metal cations such as, but not limited to, Zn2+, Ca2+, Cu2+, Mg+ and combinations thereof.

[0467] As used herein, “pharmaceutically acceptable salts” refers to derivatives of the disclosed compounds wherein the parent compound is modified by converting an existing acid or base moiety to its salt form (e.g., by reacting the free base group with a suitable organic acid). Examples of pharmaceutically acceptable salts include, but are not limited to, mineral or organic acid salts of basic residues such as amines; alkali or organic salts of acidic residues such as carboxylic acids; and the like. Representative acid addition salts include acetate, acetic acid, adipate, alginate, ascorbate, aspartate, benzenesulfonate, benzene sulfonic acid, benzoate, bisulfate, borate, butyrate, camphorate, camphorsulfonate, citrate, cyclopentanepropionate, digluconate, dodecylsulfate, ethanesulfonate, fumarate, glucoheptonate, glycerophosphate, hemisulfate, heptonate, hexanoate, hydrobromide, hydrochloride, hydroiodide, 2-hydroxy-ethanesulfonate, lactobionate, lactate, laurate, lauryl sulfate, malate, maleate, malonate, methanesulfonate, 2-naphthalenesulfonate, nicotinate, nitrate, oleate, oxalate, palmitate, pamoate, pectinate, persulfate, 3-phenylpropionate, phosphate, picrate, pivalate, propionate, stearate, succinate, sulfate, tartrate, thiocyanate, toluenesulfonate, undecanoate, valerate salts, and the like. Representative alkali or alkaline earth metal salts include sodium, lithium, potassium, calcium, magnesium, and the like, as well as nontoxic ammonium, quaternary ammonium, and amine cations, including, but not limited to ammonium, tetramethylammonium, tetraethylammonium, methylamine, dimethylamine, trimethylamine, triethylamine, ethylamine, and the like. The pharmaceutically acceptable salts of the present disclosure include the conventional non-toxic salts of the parent compound formed, for example, from non-toxic inorganic or organic acids. The pharmaceutically acceptable salts of the present disclosure can be synthesized from the parent compound which contains a basic or acidic moiety by conventional chemical methods. Generally, such salts can be prepared by reacting the free acid or base forms of these compounds with a stoichiometric amount of the appropriate base or acid in water or in an organic solvent, or in a mixture of the two; generally, nonaqueous media like ether, ethyl acetate, ethanol, isopropanol, or acetonitrile are preferred. Lists of suitable salts are found in Remington's Pharmaceutical Sciences, 17^{th} ed., Mack Publishing Company, Easton, Pa., 1985, p. 1418, Pharmaceutical Salts: Properties, Selection, and Use, P. H. Stahl and C. G. Wermuth (eds.), Wiley-VCH, 2008, and Berge et al., Journal of Pharmaceutical Science, 66, 1-19 (1977); the content of each of which is incorporated herein by reference in their entirety.

[0468] The term “pharmaceutically acceptable solvate,” as used herein, means a compound of the invention wherein molecules of a suitable solvent are incorporated in the crystal lattice. A suitable solvent is physiologically tolerable at the dosage administered. For example, solvates may be prepared by crystallization, recrystallization, or precipitation from a solution that includes organic solvents, water, or a mixture thereof. Examples of suitable solvents are ethanol, water (for example, mono-, di-, and tri-hydrates), N-methylpyrrolidinone (NMP), dimethyl sulfoxide (DMSO), N,N′-dimethylformamide (DMF), N,N′-dimethylacetamide (DMAC), 1,3-dimethyl-2-imidazolidinone (DMEU), 1,3-dimethyl-3,4,5,6-tetrahydro-2-(1H)-pyrimidinone (DMPU), acetonitrile (ACN), propylene glycol, ethyl acetate, benzyl alcohol, 2-pyrrolidone, benzyl benzoate, and the like. When water is the solvent, the solvate is referred to as a “hydrate.”

[0469] According to the present invention, the vector, e.g., AAV vector, comprising the nucleic acid sequence for the siRNA molecules of the present invention may be formulated for CNS delivery. Agents that cross the brain blood barrier (BBB) may be used. For example, some cell-penetrating peptides that can target siRNA molecules to the BBB endothelium may be used to formulate the siRNA duplexes targeting the HTT gene.

### Inactive Ingredients

[0470] In some embodiments, formulations may comprise at least one excipient which is an inactive ingredient. As used herein, the term “inactive ingredient” refers to one or more inactive agents included in formulations. In some embodiments, all, none or some of the inactive ingredients which may be used in the formulations of the present disclosure may be approved by the US Food and Drug Administration (FDA).

[0471] Formulations of AAV particles and viral vectors carrying compositions described herein may include cations or anions. In one embodiment, the formulations include metal cations such as, but not limited to, Zn2+, Ca2+, Cu2+, Mg+ and combinations thereof. As a non-limiting example, formulations may include polymers and compositions described herein complexed with a metal cation (See e.g., U.S. Pat. Nos. 6,265,389 and 6,555,525, each of which is herein incorporated by reference in its entirety).

### Delivery

[0472] In one embodiment, the viral vector comprising compositions described herein may be administered or delivered using the methods for the delivery of AAV virions described in European Patent Application No. EP1857552, the contents of which are herein incorporated by reference in its entirety.

[0473] In one embodiment, the viral vector comprising compositions described herein may be administered or delivered using the methods for delivering proteins using AAV vectors described in European Patent Application No. EP2678433, the contents of which are herein incorporated by reference in its entirety.

[0474] In one embodiment, the viral vector comprising compositions described herein may be administered or delivered using the methods for delivering DNA molecules using AAV vectors described in U.S. Pat. No. 5,858,351, the contents of which are herein incorporated by reference in its entirety.

[0475] In one embodiment, the viral vector comprising compositions described herein may be administered or delivered using the methods for delivering DNA to the bloodstream described in U.S. Pat. No. 6,211,163, the contents of which are herein incorporated by reference in its entirety.

[0476] In one embodiment, the viral vector comprising compositions described herein may be administered or delivered using the methods for delivering AAV virions described in U.S. Pat. No. 6,325,998, the contents of which are herein incorporated by reference in its entirety.

[0477] In one embodiment, the viral vector comprising compositions described herein may be administered or delivered using the methods for delivering a payload to the central nervous system described in U.S. Pat. No. 7,588,757, the contents of which are herein incorporated by reference in its entirety.

[0478] In one embodiment, the viral vector comprising compositions described herein may be administered or delivered using the methods for delivering a payload described in U.S. Pat. No. 8,283,151, the contents of which are herein incorporated by reference in its entirety.

[0479] In one embodiment, the viral vector comprising compositions described herein may be administered or delivered using the methods for delivering a payload using a glutamic acid decarboxylase (GAD) delivery vector described in International Patent Publication No. WO2001089583, the contents of which are herein incorporated by reference in its entirety.

[0480] In one embodiment, the viral vector comprising compositions described herein may be administered or delivered using the methods for delivering a payload to neural cells described in International Patent Publication No. WO2012057363, the contents of which are herein incorporated by reference in its entirety.

### Delivery to Cells

[0481] The present disclosure provides a method of delivering to a cell or tissue any of the above-described AAV polynucleotides or AAV genomes, comprising contacting the cell or tissue with said AAV polynucleotide or AAV genomes or contacting the cell or tissue with a particle comprising said AAV polynucleotide or AAV genome, or contacting the cell or tissue with any of the described compositions, including pharmaceutical compositions. The method of delivering the AAV polynucleotide or AAV genome to a cell or tissue can be accomplished in vitro, ex vivo, or in vivo.

Introduction into Cells-Synthetic dsRNA

[0482] To ensure the chemical and biological stability of siRNA molecules (e.g., siRNA duplexes and dsRNA), it is important to deliver siRNA molecules inside the target cells. In some embodiments, the cells may include, but are not limited to, cells of mammalian origin, cells of human origins, embryonic stem cells, induced pluripotent stem cells, neural stem cells, and neural progenitor cells.

[0483] Nucleic acids, including siRNA, carry a net negative charge on the sugar-phosphate backbone under normal physiological conditions. In order to enter the cell, a siRNA molecule must come into contact with a lipid bilayer of the cell membrane, whose head groups are also negatively charged.

[0484] The siRNA duplexes can be complexed with a carrier that allows them to traverse cell membranes such as package particles to facilitate cellular uptake of the siRNA. The package particles may include, but are not limited to, liposomes, nanoparticles, cationic lipids, polyethylenimine derivatives, dendrimers, carbon nanotubes and the combination of carbon-made nanoparticles with dendrimers. Lipids may be cationic lipids and/or neutral lipids. In addition to well established lipophilic complexes between siRNA molecules and cationic carriers, siRNA molecules can be conjugated to a hydrophobic moiety, such as cholesterol (e.g., U.S. Patent Publication No. 20110110937; the content of which is herein incorporated by reference in its entirety). This delivery method holds a potential of improving in vitro cellular uptake and in vivo pharmacological properties of siRNA molecules. The siRNA molecules of the present invention may also be conjugated to certain cationic cell-penetrating peptides (CPPs), such as MPG, transportan or penetratin covalently or non-covalently (e.g., U.S. Patent Publication No. 20110086425; the content of which is herein incorporated by reference in its entirety).

Introduction into Cells-AAV Vectors

[0485] The siRNA molecules (e.g., siRNA duplexes) of the present invention may be introduced into cells using any of a variety of approaches such as, but not limited to, viral vectors (e.g., AAV vectors). These viral vectors are engineered and optimized to facilitate the entry of siRNA molecule into cells that are not readily amendable to transfection. Also, some synthetic viral vectors possess an ability to integrate the shRNA into the cell genome, thereby leading to stable siRNA expression and long-term knockdown of a target gene. In this manner, viral vectors are engineered as vehicles for specific delivery while lacking the deleterious replication and/or integration features found in wild-type virus.

[0486] In some embodiments, the siRNA molecules of the present invention are introduced into a cell by contacting the cell with a composition comprising a lipophilic carrier and a vector, e.g., an AAV vector, comprising a nucleic acid sequence encoding the siRNA molecules of the present invention. In other embodiments, the siRNA molecule is introduced into a cell by transfecting or infecting the cell with a vector, e.g., an AAV vector, comprising nucleic acid sequences capable of producing the siRNA molecule when transcribed in the cell. In some embodiments, the siRNA molecule is introduced into a cell by injecting into the cell a vector, e.g., an AAV vector, comprising a nucleic acid sequence capable of producing the siRNA molecule when transcribed in the cell.

[0487] In some embodiments, prior to transfection, a vector, e.g., an AAV vector, comprising a nucleic acid sequence encoding the siRNA molecules of the present invention may be transfected into cells.

[0488] In other embodiments, the vectors, e.g., AAV vectors, comprising the nucleic acid sequence encoding the siRNA molecules of the present invention may be delivered into cells by electroporation (e.g. U.S. Patent Publication No. 20050014264; the content of which is herein incorporated by reference in its entirety).

[0489] Other methods for introducing vectors, e.g., AAV vectors, comprising the nucleic acid sequence for the siRNA molecules described herein may include photochemical internalization as described in U.S. Patent publication No. 20120264807; the content of which is herein incorporated by reference in its entirety.

[0490] In some embodiments, the formulations described herein may contain at least one vector, e.g., AAV vectors, comprising the nucleic acid sequence encoding the siRNA molecules described herein. In one embodiment, the siRNA molecules may target the HTT gene at one target site. In another embodiment, the formulation comprises a plurality of vectors, e.g., AAV vectors, each vector comprising a nucleic acid sequence encoding a siRNA molecule targeting the HTT gene at a different target site. The HTT may be targeted at 2, 3, 4, 5 or more than 5 sites.

[0491] In one embodiment, the vectors, e.g., AAV vectors, from any relevant species, such as, but not limited to, human, dog, mouse, rat or monkey may be introduced into cells.

[0492] In one embodiment, the vectors, e.g., AAV vectors, may be introduced into cells which are relevant to the disease to be treated. As a non-limiting example, the disease is HD and the target cells are neurons and astrocytes. As another non-limiting example, the disease is HD and the target cells are medium spiny neurons, cortical neurons and astrocytes.

[0493] In one embodiment, the vectors, e.g., AAV vectors, may be introduced into cells which have a high level of endogenous expression of the target sequence.

[0494] In another embodiment, the vectors, e.g., AAV vectors, may be introduced into cells which have a low level of endogenous expression of the target sequence.

[0495] In one embodiment, the cells may be those which have a high efficiency of AAV transduction.

### Delivery to Subjects

[0496] The present disclosure additionally provides a method of delivering to a subject, including a mammalian subject, any of the above-described AAV polynucleotides or AAV genomes comprising administering to the subject said AAV polynucleotide or AAV genome, or administering to the subject a particle comprising said AAV polynucleotide or AAV genome, or administering to the subject any of the described compositions, including pharmaceutical compositions.

[0497] The pharmaceutical compositions of viral vectors described herein may be characterized by one or more of bioavailability, therapeutic window and/or volume of distribution.

### III. ADMINISTRATION AND DOSING

### Administration

[0498] The vector, e.g., AAV vector, comprising a nucleic acid sequence encoding the siRNA molecules of the present invention may be administered by any route which results in a therapeutically effective outcome. These include, but are not limited to, within the parenchyma of an organ such as, but not limited to, a brain (e.g., intraparenchymal), corpus striatum (intrastriatal), enteral (into the intestine), gastroenteral, epidural, oral (by way of the mouth), transdermal, peridural, intracerebral (into the cerebrum), intracerebroventricular (into the cerebral ventricles), epicutaneous (application onto the skin), intradermal, (into the skin itself), subcutaneous (under the skin), nasal administration (through the nose), intravenous (into a vein), intravenous bolus, intravenous drip, intraarterial (into an artery), intramuscular (into a muscle), intracardiac (into the heart), intraosscous infusion (into the bone marrow), intrathecal (into the spinal canal), subpial (between the pia and the underlying tissue), intraganglionic (into the ganglion), intraperitoneal, (infusion or injection into the peritoneum), intravesical infusion, intravitreal, (through the eye), intracavernous injection (into a pathologic cavity) intracavitary (into the base of the penis), intravaginal administration, intrauterine, extra-amniotic administration, transdermal (diffusion through the intact skin for systemic distribution), transmucosal (diffusion through a mucous membrane), transvaginal, insufflation (snorting), sublingual, sublabial, enema, eye drops (onto the conjunctiva), in car drops, auricular (in or by way of the car), buccal (directed toward the check), conjunctival, cutaneous, dental (to a tooth or teeth), electro-osmosis, endocervical, endosinusial, endotracheal, extracorporeal, hemodialysis, infiltration, interstitial, intra-abdominal, intra-amniotic, intra-articular, intrabiliary, intrabronchial, intrabursal, intracartilaginous (within a cartilage), intracaudal (within the cauda equine), intracisternal (within the cisterna magna cerebellomedularis), intracorneal (within the cornea), dental intracornal, intracoronary (within the coronary arteries), intracorporus cavernosum (within the dilatable spaces of the corporus cavernosa of the penis), intradiscal (within a disc), intraductal (within a duct of a gland), intraduodenal (within the duodenum), intradural (within or beneath the dura), intraepidermal (to the epidermis), intraesophageal (to the esophagus), intragastric (within the stomach), intragingival (within the gingivac), intrailcal (within the distal portion of the small intestine), intralesional (within or introduced directly to a localized lesion), intraluminal (within a lumen of a tube), intralymphatic (within the lymph), intramedullary (within the marrow cavity of a bone), intrameningeal (within the meninges), intraocular (within the eye), intraovarian (within the ovary), intrapericardial (within the pericardium), intrapleural (within the pleura), intraprostatic (within the prostate gland), intrapulmonary (within the lungs or its bronchi), intrasinal (within the nasal or periorbital sinuses), intraspinal (within the vertebral column), intrasynovial (within the synovial cavity of a joint), intratendinous (within a tendon), intratesticular (within the testicle), intrathecal (within the cerebrospinal fluid at any level of the cerebrospinal axis), intrathoracic (within the thorax), intratubular (within the tubules of an organ), intratumor (within a tumor), intratympanic (within the aurus media), intravascular (within a vessel or vessels), intraventricular (within a ventricle), iontophoresis (by means of electric current where ions of soluble salts migrate into the tissues of the body), irrigation (to bathe or flush open wounds or body cavities), laryngeal (directly upon the larynx), nasogastric (through the nose and into the stomach), occlusive dressing technique (topical route administration which is then covered by a dressing which occludes the area), ophthalmic (to the external eye), oropharyngeal (directly to the mouth and pharynx), parenteral, percutaneous, periarticular, peridural, perineural, periodontal, rectal, respiratory (within the respiratory tract by inhaling orally or nasally for local or systemic effect), retrobulbar (behind the pons or behind the eyeball), soft tissue, subarachnoid, subconjunctival, submucosal, topical, transplacental (through or across the placenta), transtracheal (through the wall of the trachea), transtympanic (across or through the tympanic cavity), ureteral (to the ureter), urethral (to the urethra), vaginal, caudal block, diagnostic, nerve block, biliary perfusion, cardiac perfusion, photopheresis or spinal.

[0499] In specific embodiments, compositions of vector, e.g., AAV vector, comprising a nucleic acid sequence encoding the siRNA molecules of the present invention may be administered in a way which facilitates the vectors or siRNA molecule to enter the central nervous system and penetrate into medium spiny and/or cortical neurons and/or astrocytes.

[0500] In some embodiments, the vector, e.g., AAV vector, comprising a nucleic acid sequence encoding the siRNA molecules of the present invention may be administered by intramuscular injection.

[0501] In one embodiment, the vector, e.g., AAV vector, comprising a nucleic acid sequence encoding the siRNA molecules of the present invention may be administered via intraparenchymal injection.

[0502] In one embodiment, the vector, e.g., AAV vector, comprising a nucleic acid sequence encoding the siRNA molecules of the present invention may be administered via intraparenchymal injection and intrathecal injection.

[0503] In one embodiment, the vector, e.g., AAV vector, comprising a nucleic acid sequence encoding the siRNA molecules of the present invention may be administered via intrastriatal injection.

[0504] In one embodiment, the vector, e.g., AAV vector, comprising a nucleic acid sequence encoding the siRNA molecules of the present invention may be administered via intrastriatal injection and another route of administration described herein.

[0505] In some embodiments, AAV vectors that express siRNA duplexes of the present invention may be administered to a subject by peripheral injections (e.g., intravenous) and/or intranasal delivery. It was disclosed in the art that the peripheral administration of AAV vectors for siRNA duplexes can be transported to the central nervous system, for example, to the neurons (e.g., U.S. Patent Publication Nos. 20100240739; and 20100130594; the content of each of which is incorporated herein by reference in their entirety).

[0506] In other embodiments, compositions comprising at least one vector, e.g., AAV vector, comprising a nucleic acid sequence encoding the siRNA molecules of the present invention may be administered to a subject by intracranial delivery (See, e.g., U.S. Pat. No. 8,119,611; the content of which is incorporated herein by reference in its entirety).

[0507] The vector, e.g., AAV vector, comprising a nucleic acid sequence encoding the siRNA molecules of the present invention may be administered in any suitable form, either as a liquid solution or suspension, as a solid form suitable for liquid solution or suspension in a liquid solution. The siRNA duplexes may be formulated with any appropriate and pharmaceutically acceptable excipient.

[0508] The vector, e.g., AAV vector, comprising a nucleic acid sequence encoding the siRNA molecules of the present invention may be administered in a “therapeutically effective” amount, i.e., an amount that is sufficient to alleviate and/or prevent at least one symptom associated with the disease, or provide improvement in the condition of the subject.

[0509] In one embodiment, the vector, e.g., AAV vector, may be administered to the CNS in a therapeutically effective amount to improve function and/or survival for a subject with Huntington's Disease (HD). As a non-limiting example, the vector may be administered by direct infusion into the striatum.

[0510] In one embodiment, the vector, e.g., AAV vector, may be administered to a subject (e.g., to the CNS of a subject via intrathecal administration) in a therapeutically effective amount for the siRNA duplexes or dsRNA to target the medium spiny neurons, cortical neurons and/or astrocytes. As a non-limiting example, the siRNA duplexes or dsRNA may reduce the expression of HTT protein or mRNA. As another non-limiting example, the siRNA duplexes or dsRNA can suppress HTT and reduce HTT mediated toxicity. The reduction of HTT protein and/or mRNA as well as HTT mediated toxicity may be accomplished with almost no enhanced inflammation.

[0511] In one embodiment, the vector, e.g., AAV vector, may be administered to a subject (e.g., to the CNS of a subject) in a therapeutically effective amount to slow the functional decline of a subject (e.g., determined using a known evaluation method such as the unified Huntington's disease rating scale (UHDRS)). As a non-limiting example, the vector may be administered via intraparenchymal injection.

[0512] In one embodiment, the vector, e.g., AAV vector, may be administered to the cisterna magna in a therapeutically effective amount to transduce medium spiny neurons, cortical neurons and/or astrocytes. As a non-limiting example, the vector may be administered intrathecally.

[0513] In one embodiment, the vector, e.g., AAV vector, may be administered using intrathecal infusion in a therapeutically effective amount to transduce medium spiny neurons, cortical neurons and/or astrocytes. As a non-limiting example, the vector may be administered intrathecally.

[0514] In one embodiment, the vector, e.g., AAV vector, may be administered to the cisterna magna in a therapeutically effective amount to transduce medium spiny neurons, cortical neurons and/or astrocytes. As a non-limiting example, the vector may be administered by intraparenchymal injection.

[0515] In one embodiment, the vector, e.g., AAV vector, comprising a modulatory polynucleotide may be formulated. As a non-limiting example the baricity and/or osmolality of the formulation may be optimized to ensure optimal drug distribution in the central nervous system or a region or component of the central nervous system.

[0516] In one embodiment, the vector, e.g., AAV vector, comprising a modulatory polynucleotide may be delivered to a subject via a single route administration.

[0517] In one embodiment, the vector, e.g., AAV vector, comprising a modulatory polynucleotide may be delivered to a subject via a multi-site route of administration. A subject may be administered the vector, e.g., AAV vector, comprising a modulatory polynucleotide at 2, 3, 4, 5 or more than 5 sites.

[0518] In one embodiment, a subject may be administered the vector, e.g., AAV vector, comprising a modulatory polynucleotide described herein using a bolus injection.

[0519] In one embodiment, a subject may be administered the vector, e.g., AAV vector, comprising a modulatory polynucleotide described herein using sustained delivery over a period of minutes, hours or days. The infusion rate may be changed depending on the subject, distribution, formulation or another delivery parameter.

[0520] In one embodiment, the vector, e.g., AAV vector, described herein is administered via putamen and caudate infusion. As a non-limiting example, the dual infusion provides a broad striatal distribution as well as a frontal and temporal cortical distribution.

[0521] In one embodiment, the vector, e.g., AAV vector, is AAV-DJ8 which is administered via unilateral putamen infusion. As a non-limiting example, the distribution of the administered AAV-DJ8 is similar to the distribution of AAV1 delivered via unilateral putamen infusion.

[0522] In one embodiment, the vector, e.g., AAV vector, described herein is administered via intrathecal (IT) infusion at C1. The infusion may be for 1, 2, 3, 4, 6, 7, 8, 9, 10, 11, 12, 13, 14, 15 or more than 15 hours.

[0523] In one embodiment, the selection of subjects for administration of the vector, e.g., AAV vector, described herein and/or the effectiveness of the dose, route of administration and/or volume of administration may be evaluated using imaging of the perivascular spaces (PVS) which are also known as Virchow-Robin spaces. PVS surround the arterioles and venules as they perforate brain parenchyma and are filled with cerebrospinal fluid (CSF)/interstitial fluid. PVS are common in the midbrain, basal ganglia, and centrum semiovale. While not wishing to be bound by theory, PVS may play a role in the normal clearance of metabolites and have been associated with worse cognition and several disease states including Parkinson's disease. PVS are usually are normal in size but they can increase in size in a number of disease states. Potter et al. (Cerebrovasc Dis. 2015 January; 39 (4): 224-231; the contents of which are herein incorporated by reference in its entirety) developed a grading method where they studied a full range of PVS and rated basal ganglia, centrum semiovale and midbrain PVS. They used the frequency and range of PVS used by Mac and Lullich et al. (J Neurol Neurosurg Psychiatry. 2004 November; 75 (11): 1519-23; the contents of which are herein incorporated by reference in its entirety) and Potter et al. gave 5 ratings to basal ganglia and centrum semiovale PVS: 0 (none), 1 (1-10), 2 (11-20), 3 (21-40) and 4 (>40) and 2 ratings to midbrain PVS: 0 (non visible) or 1 (visible). The user guide for the rating system by Potter et al. can be found at: www.sbirc.cd.ac.uk/documents/epvs-rating-scale-user-guide.pdf.

### Dosing

[0524] The pharmaceutical compositions of the present invention may be administered to a subject using any amount effective for reducing, preventing and/or treating a HTT-associated disorder (e.g., Huntington' Disease (HD)). The exact amount required will vary from subject to subject, depending on the species, age, and general condition of the subject, the severity of the disease, the particular composition, its mode of administration, its mode of activity, and the like.

[0525] The compositions of the present invention are typically formulated in unit dosage form for case of administration and uniformity of dosage. It will be understood, however, that the total daily usage of the compositions of the present invention may be decided by the attending physician within the scope of sound medical judgment. The specific therapeutic effectiveness for any particular patient will depend upon a variety of factors including the disorder being treated and the severity of the disorder; the activity of the specific compound employed; the specific composition employed; the age, body weight, general health, sex and diet of the patient; the time of administration, route of administration, and rate of excretion of the siRNA duplexes employed; the duration of the treatment; drugs used in combination or coincidental with the specific compound employed; and like factors well known in the medical arts.

[0526] In one embodiment, the age and sex of a subject may be used to determine the dose of the compositions of the present invention. As a non-limiting example, a subject who is older may receive a larger dose (e.g., 5-10%, 10-20%, 15-30%, 20-50%, 25-50% or at least 1%, 2%, 3%, 4%, 5%, 10%, 20%, 30%, 40%, 50%, 60%, 70%, 80%, 90% or more than 90% more) of the composition as compared to a younger subject. As another non-limiting example, a subject who is younger may receive a larger dose (e.g., 5-10%, 10-20%, 15-30%, 20-50%, 25-50% or at least 1%, 2%, 3%, 4%, 5%, 10%, 20%, 30%, 40%, 50%, 60%, 70%, 80%, 90% or more than 90% more) of the composition as compared to an older subject. As yet another non-limiting example, a subject who is female may receive a larger dose (e.g., 5-10%, 10-20%, 15-30%, 20-50%, 25-50% or at least 1%, 2%, 3%, 4%, 5%, 10%, 20%, 30%, 40%, 50%, 60%, 70%, 80%, 90% or more than 90% more) of the composition as compared to a male subject. As yet another non-limiting example, a subject who is male may receive a larger dose (e.g., 5-10%, 10-20%, 15-30%, 20-50%, 25-50% or at least 1%, 2%, 3%, 4%, 5%, 10%, 20%, 30%, 40%, 50%, 60%, 70%, 80%, 90% or more than 90% more) of the composition as compared to a female subject

[0527] In some specific embodiments, the doses of AAV vectors for delivering siRNA duplexes of the present invention may be adapted depending on the disease condition, the subject and the treatment strategy.

[0528] In one embodiment, delivery of the compositions in accordance with the present invention to cells comprises a rate of delivery defined by [VG/hour=mL/hour*VG/mL] wherein VG is viral genomes, VG/mL is composition concentration, and mL/hour is rate of prolonged delivery.

[0529] In one embodiment, delivery of compositions in accordance with the present invention to cells may comprise a total concentration per subject between about 1×10⁶ VG and about 1×10¹⁶ VG. In some embodiments, delivery may comprise a composition concentration of about 1×10⁶, 2×10⁶, 3×10⁶, 4×10⁶, 5×10⁶, 6×10⁶, 7×10⁶, 8×10⁶, 9×10⁶, 1×10⁷, 2×10⁷, 3×10⁷, 4×10⁷, 5×10⁷, 6×10⁷, 7×10⁷, 8×10⁷, 9×10⁷, 1×10⁸, 2×10⁸, 3×10⁸, 4×10⁸, 5×10⁸, 6×10⁸, 7×10⁸, 8×10⁸, 9×10⁸, 1×10⁹, 2×10⁹, 3×10⁹, 4×10⁹, 5×10⁹, 6×10⁹, 7×10⁹, 8×10⁹, 9×10⁹, 1×10¹⁰, 2×10¹⁰, 3×10¹⁰, 4×10¹⁰, 5×10¹⁰, 6×10¹⁰, 7×10¹⁰, 8×10¹⁰, 9×10¹⁰, 1×10¹¹, 1.1×10¹¹, 1.2×10¹¹, 1.3×10¹¹, 1.4×10¹¹, 1.5×10¹¹, 1.6×10¹¹, 1.7×10¹¹, 1.8×10¹¹, 1.9×10¹¹, 2×10¹¹, 2.1×10¹¹, 2.2×10¹¹, 2.3×10¹¹, 2.4×10¹¹, 2.5×10¹¹, 2.6×10¹¹, 2.7×10¹¹, 2.8×10¹¹, 2.9×10¹¹, 3×10¹¹, 4×10¹¹, 5×10¹¹, 6×10¹¹, 7×10¹¹, 7.1×10¹¹, 7.2×10¹¹, 7.3×10¹¹, 7.4×10¹¹, 7.5×10¹¹, 7.6×10¹¹, 7.7×10¹¹, 7.8×10¹¹, 7.9×10¹¹, 8×10¹¹, 9×10¹¹, 1×10¹², 1.1×10¹², 1.2×10¹², 1.3×10¹², 1.4×10¹², 1.5×10¹², 1.6×10¹², 1.7×10¹², 1.8×10¹², 1.9×10¹², 2×10¹², 2.1×10¹², 2.2×10¹², 2.3×10¹², 2.4×10¹², 2.5×10¹², 2.6×10¹², 2.7×10¹², 2.8×10¹², 2.9×10¹², 3×10¹², 3.1×10¹², 3.2×10¹², 3.3×10¹², 3.4×10¹², 3.5×10¹², 3.6×10¹², 3.7×10¹², 3.8×10¹², 3.9×10¹², 4×10¹², 4.1×10¹², 4.2×10¹², 4.3×10¹², 4.4×10¹², 4.5×10¹², 4.6×10¹², 4.7×10¹², 4.8×10¹², 4.9×10¹², 5×10¹², 6×10¹², 6.1×10¹², 6.2×10¹², 6.3×10¹², 6.4×10¹², 6.5×10¹², 6.6×10¹², 6.7×10¹², 6.8×10¹², 6.9×10¹², 7×10¹², 8×10¹², 8.1×10¹², 8.2×10¹², 8.3×10¹², 8.4×10¹², 8.5×10¹², 8.6×10¹², 8.7×10¹², 8.8×10¹², 8.9×10¹², 9×10¹², 1×10¹³, 1.1×10¹³, 1.2×10¹³, 1.3×10¹³, 1.4×10¹³, 1.5×10¹³, 1.6×10¹³, 1.7×10¹³, 1.8×10¹³, 1.9×10¹³, 2×10¹³, 3×10¹³, 4×10¹³, 5×10¹³, 6×10¹³, 6.7×10¹³, 7×10¹³, 8×10¹³, 9×10¹³, 1×10¹⁴, 2×10¹⁴, 3×10¹⁴, 4×10¹⁴, 5×10¹⁴, 6×10¹⁴, 7×10¹⁴, 8×10¹⁴, 9×10¹⁴, 1×10¹⁵, 2×10¹⁵, 3×10¹⁵, 4×10¹⁵, 5×10¹⁵, 6×10¹⁵, 7×10¹⁵, 8×10¹⁵, 9×10¹⁵, or 1×10¹⁶ VG/subject.

[0530] In one embodiment, delivery of compositions in accordance with the present invention to cells may comprise a total concentration per subject between about 1×10⁶ VG/kg and about 1×10¹⁶ VG/kg. In some embodiments, delivery may comprise a composition concentration of about 1×10⁶, 2×10⁶, 3×10⁶, 4×10⁶, 5×10⁶, 6×10⁶, 7×10⁶, 8×10⁶, 9×10⁶, 1×10⁷, 2×10⁷, 3×10⁷, 4×10⁷, 5×10⁷, 6×10⁷, 7×10⁷, 8×10⁷, 9×10⁷, 1×10⁸, 2×10⁸, 3×10⁸, 4×10⁸, 5×10⁸, 6×10⁸, 7×10⁸, 8×10⁸, 9×10⁸, 1×10⁹, 2×10⁹, 3×10⁹, 4×10⁹, 5×10⁹, 6×10⁹, 7×10⁹, 8×10⁹, 9×10⁹, 1×10¹⁰, 2×10¹⁰, 3×10¹⁰, 4×10¹⁰, 5×10¹⁰, 6×10¹⁰, 7×10¹⁰, 8×10¹⁰, 9×10¹⁰, 1×10¹¹, 1.1×10¹¹, 1.2×10¹¹, 1.3×10¹¹, 1.4×10¹¹, 1.5×10¹¹, 1.6×10¹¹, 1.7×10¹¹, 1.8×10¹¹, 1.9×10¹¹, 2×10¹¹, 2.1×10¹¹, 2.2×10¹¹, 2.3×10¹¹, 2.4×10¹¹, 2.5×10¹¹, 2.6×10¹¹, 2.7×10¹¹, 2.8×10¹¹, 2.9×10¹¹, 3×10¹¹, 4×10¹¹, 5×10¹¹, 6×10¹¹, 7×10¹¹, 7.1×10¹¹, 7.2×10¹¹, 7.3×10¹¹, 7.4×10¹¹, 7.5×10¹¹, 7.6×10¹¹, 7.7×10¹¹, 7.8×10¹¹, 7.9×10¹¹, 8×10¹¹, 9×10¹¹, 1×10¹², 1.1×10¹², 1.2×10¹², 1.3×10¹², 1.4×10¹², 1.5×10¹², 1.6×10¹², 1.7×10¹², 1.8×10¹², 1.9×10¹², 2×10¹², 2.1×10¹², 2.2×10¹², 2.3×10¹², 2.4×10¹², 2.5×10¹², 2.6×10¹², 2.7×10¹², 2.8×10¹², 2.9×10¹², 3×10¹², 3.1×10¹², 3.2×10¹², 3.3×10¹², 3.4×10¹², 3.5×10¹², 3.6×10¹², 3.7×10¹², 3.8×10¹², 3.9×10¹², 4×10¹², 4.1×10¹², 4.2×10¹², 4.3×10¹², 4.4×10¹², 4.5×10¹², 4.6×10¹², 4.7×10¹², 4.8×10¹², 4.9×10¹², 5×10¹², 6×10¹², 6.1×10¹², 6.2×10¹², 6.3×10¹², 6.4×10¹², 6.5×10¹², 6.6×10¹², 6.7×10¹², 6.8×10¹², 6.9×10¹², 7×10¹², 8×10¹², 8.1×10¹², 8.2×10¹², 8.3×10¹², 8.4×10¹², 8.5×10¹², 8.6×10¹², 8.7×10¹², 8.8×10¹², 8.9×10¹², 9×10¹², 1×10¹³, 1.1×10¹³, 1.2×10¹³, 1.3×10¹³, 1.4×10¹³, 1.5×10¹³, 1.6×10¹³, 1.7×10¹³, 1.8×10¹³, 1.9×10¹³, 2×10¹³, 3×10¹³, 4×10¹³, 5×10¹³, 6×10¹³, 6.7×10¹³, 7×10¹³, 8×10¹³, 9×10¹³, 1×10¹⁴, 2×10¹⁴, 3×10¹⁴, 4×10¹⁴, 5×10¹⁴, 6×10¹⁴, 7×10¹⁴, 8×10¹⁴, 9×10¹⁴, 1×10¹⁵, 2×10¹⁵, 3×10¹⁵, 4×10¹⁵, 5×10¹⁵, 6×10¹⁵, 7×10¹⁵, 8×10¹⁵, 9×10¹⁵, or 1×10¹⁶ VG/kg.

[0531] In one embodiment, about 105 to 106 viral genome (unit) may be administered per dose.

[0532] In one embodiment, delivery of the compositions in accordance with the present invention to cells may comprise a total concentration between about 1×10⁶ VG/mL and about 1×10¹⁶ VG/mL. In some embodiments, delivery may comprise a composition concentration of about 1×10⁶, 2×10⁶, 3×10⁶, 4×10⁶, 5×10⁶, 6×10⁶, 7×10⁶, 8×10⁶, 9×10⁶, 1×10⁷, 2×10⁷, 3×10⁷, 4×10⁷, 5×10⁷, 6×10⁷, 7×10⁷, 8×10⁷, 9×10⁷, 1×10⁸, 2×10⁸, 3×10⁸, 4×10⁸, 5×10⁸, 6×10⁸, 7×10⁸, 8×10⁸, 9×10⁸, 1×10⁹, 2×10⁹, 3×10⁹, 4×10⁹, 5×10⁹, 6×10⁹, 7×10⁹, 8×10⁹, 9×10⁹, 1×10¹⁰, 2×10¹⁰, 3×10¹⁰, 4×10¹⁰, 5×10¹⁰, 6×10¹⁰, 7×10¹⁰, 8×10¹⁰, 9×10¹⁰, 1×10¹¹, 1.1×10¹¹, 1.2×10¹¹, 1.3×10¹¹, 1.4×10¹¹, 1.5×10¹¹, 1.6×10¹¹, 1.7×10¹¹, 1.8×10¹¹, 1.9×10¹¹, 2×10¹¹, 3×10¹¹, 4×10¹¹, 5×10¹¹, 6×10¹¹, 7×10¹¹, 8×10¹¹, 9×10¹¹, 1×10¹², 1.1×10¹², 1.2×10¹², 1.3×10¹², 1.4×10¹², 1.5×10¹², 1.6×10¹², 1.7×10¹², 1.8×10¹², 1.9×10¹², 2×10¹², 2.1×10¹², 2.2×10¹², 2.3×10¹², 2.4×10¹², 2.5×10¹², 2.6×10¹², 2.7×10¹², 2.8×10¹², 2.9×10¹², 3×10¹², 3.1×10¹², 3.2×10¹², 3.3×10¹², 3.4×10¹², 3.5×10¹², 3.6×10¹², 3.7×10¹², 3.8×10¹², 3.9×10¹², 4×10¹², 4.1×10¹², 4.2×10¹², 4.3×10¹², 4.4×10¹², 4.5×10¹², 4.6×10¹², 4.7×10¹², 4.8×10¹², 4.9×10¹², 5×10¹², 6×10¹², 6.1×10¹², 6.2×10¹², 6.3×10¹², 6.4×10¹², 6.5×10¹², 6.6×10¹², 6.7×10¹², 6.8×10¹², 6.9×10¹², 7×10¹², 8×10¹², 9×10¹², 1×10¹³, 1.1×10¹³, 1.2×10¹³, 1.3×10¹³, 1.4×10¹³, 1.5×10¹³, 1.6×10¹³, 1.7×10¹³, 1.8×10¹³, 1.9×10¹³, 2×10¹³, 3×10¹³, 4×10¹³, 5×10¹³, 6×10¹³, 6.7×10¹³, 7×10¹³, 8×10¹³, 9×10¹³, 1×10¹⁴, 2×10¹⁴, 3×10¹⁴, 4×10¹⁴, 5×10¹⁴, 6×10¹⁴, 7×10¹⁴, 8×10¹⁴, 9×10¹⁴, 1×10¹⁵, 2×10¹⁵, 3×10¹⁵, 4×10¹⁵, 5×10¹⁵, 6×10¹⁵, 7×10¹⁵, 8×10¹⁵, 9×10¹⁵, or 1×10¹⁶ VG/mL.

[0533] In certain embodiments, the desired siRNA duplex dosage may be delivered using multiple administrations (e.g., two, three, four, five, six, seven, eight, nine, ten, eleven, twelve, thirteen, fourteen, or more administrations). When multiple administrations are employed, split dosing regimens such as those described herein may be used. As used herein, a “split dose” is the division of single unit dose or total daily dose into two or more doses, e.g., two or more administrations of the single unit dose. As used herein, a “single unit dose” is a dose of any modulatory polynucleotide therapeutic administered in one dose/at one time/single route/single point of contact, i.e., single administration event. As used herein, a “total daily dose” is an amount given or prescribed in a 24 hour period. It may be administered as a single unit dose. In one embodiment, the viral vectors comprising the modulatory polynucleotides of the present invention are administered to a subject in split doses. They may be formulated in buffer only or in a formulation described herein.

[0534] In one embodiment, the dose, concentration and/or volume of the composition described herein may be adjusted depending on the contribution of the caudate or putamen to cortical and subcortical distribution after administration. The administration may be intracerebroventricular, intraputamenal, intrathalamic, intraparenchymal, subpial, and/or intrathecal administration.

[0535] In one embodiment, the dose, concentration and/or volume of the composition described herein may be adjusted depending on the cortical and neuraxial distribution following administration by intracerebroventricular, intraputamenal, intrathalamic, intraparenchymal, subpial, and/or intrathecal delivery.

### IV. METHODS AND USES OF THE COMPOSITIONS OF THE INVENTION

### Methods of Treatment of Huntington's Disease

[0536] Provided in the present invention are methods for introducing the vectors, e.g., AAV vectors, comprising a nucleic acid sequence encoding the siRNA molecules of the present invention into cells, the method comprising introducing into said cells any of the vectors in an amount sufficient for degradation of target HTT mRNA to occur, thereby activating target-specific RNAi in the cells. In some aspects, the cells may be stem cells, neurons such as medium spiny or cortical neurons, muscle cells and glial cells such as astrocytes.

[0537] Disclosed in the present invention are methods for treating Huntington's Disease (HD) associated with HTT protein in a subject in need of treatment. The method optionally comprises administering to the subject a therapeutically effective amount of a composition comprising at least vectors, e.g., AAV vectors, comprising a nucleic acid sequence encoding the siRNA molecules of the present invention. As a non-limiting example, the siRNA molecules can silence HTT gene expression, inhibit HTT protein production, and reduce one or more symptoms of HD in the subject such that HD is therapeutically treated.

[0538] In some embodiments, the composition comprising the vectors, e.g., AAV vectors, comprising a nucleic acid sequence encoding the siRNA molecules of the present invention is administered to the central nervous system of the subject. In other embodiments, the composition comprising the vectors, e.g., AAV vectors, comprising a nucleic acid sequence encoding the siRNA molecules of the present invention is administered to a tissue of a subject (e.g., brain of the subject).

[0539] In one embodiment, the composition comprising the vectors, e.g., AAV vectors, comprising a nucleic acid sequence encoding the siRNA molecules of the present invention is administered to the central nervous system of the subject via intraparenchymal injection.

[0540] In one embodiment, the composition comprising the vectors, e.g., AAV vectors, comprising a nucleic acid sequence encoding the siRNA molecules of the present invention is administered to the central nervous system of the subject via intraparenchymal injection and intrathecal injection.

[0541] In one embodiment, the composition comprising the vectors, e.g., AAV vectors, comprising a nucleic acid sequence encoding the siRNA molecules of the present invention is administered to the central nervous system of the subject via intraparenchymal injection and intracerebroventricular injection.

[0542] In one embodiment, the vectors, e.g., AAV vectors, comprising a nucleic acid sequence encoding the siRNA molecules of the present invention may be delivered into specific types of targeted cells, including, but not limited to, neurons including medium spiny or cortical neurons; glial cells including oligodendrocytes, astrocytes and microglia; and/or other cells surrounding neurons such as T cells.

[0543] In one embodiment, the vectors, e.g., AAV vectors, comprising a nucleic acid sequence encoding the siRNA molecules of the present invention may be delivered to neurons in the striatum and/or neurons of the cortex.

[0544] In some embodiments, the vectors, e.g., AAV vectors, comprising a nucleic acid sequence encoding the siRNA molecules of the present invention may be used as a therapy for HD.

[0545] In some embodiments, the vectors, e.g., AAV vectors, comprising a nucleic acid sequence encoding the siRNA molecules of the present invention may be used to suppress HTT protein in neurons and/or astrocytes of the striatum and/or the cortex. As a non-limiting example, the suppression of HTT protein is in medium spiny neurons of the striatum and/or neurons of the cortex.

[0546] In some embodiments, the vectors, e.g., AAV vectors, comprising a nucleic acid sequence encoding the siRNA molecules of the present invention may be used to suppress HTT protein in neurons and/or astrocytes of the striatum and/or the cortex and reduce associated neuronal toxicity. The suppression of HTT protein in the neurons and/or astrocytes of the striatum and/or the cortex may be, independently, suppressed by 5%, 10%, 15%, 20%, 25%, 30%, 35%, 40%, 45%, 50%, 55%, 60%, 65%, 70%, 75%, 80%, 85%, 90%, 95%, or more than 95%, 5-15%, 5-20%, 5-25%, 5-30%, 5-35%, 5-40%, 5-45%, 5-50%, 5-55%, 5-60%, 5-65%, 5- 70%, 5-75%, 5-80%, 5-85%, 5-90%, 5-95%, 10-20%, 10-25%, 10-30%, 10-35%, 10-40%, 10-45%, 10-50%, 10-55%, 10-60%, 10-65%, 10-70%, 10-75%, 10-80%, 10-85%, 10-90%, 10-95%, 15-25%, 15-30%, 15-35%, 15-40%, 15-45%, 15-50%, 15-55%, 15-60%, 15-65%, 15-70%, 15-75%, 15-80%, 15-85%, 15-90%, 15-95%, 20-30%, 20-35%, 20-40%, 20-45%, 20-50%, 20-55%, 20-60%, 20-65%, 20-70%, 20-75%, 20-80%, 20-85%, 20-90%, 20-95%, 25-35%, 25-40%, 25-45%, 25-50%, 25-55%, 25-60%, 25-65%, 25-70%, 25-75%, 25-80%, 25-85%, 25-90%, 25-95%, 30-40%, 30-45%, 30-50%, 30-55%, 30-60%, 30-65%, 30-70%, 30-75%, 30-80%, 30-85%, 30-90%, 30-95%, 35-45%, 35-50%, 35-55%, 35-60%, 35-65%, 35-70%, 35-75%, 35-80%, 35-85%, 35-90%, 35-95%, 40-50%, 40-55%, 40-60%, 40-65%, 40-70%, 40-75%, 40-80%, 40-85%, 40-90%, 40-95%, 45-55%, 45-60%, 45-65%, 45-70%, 45-75%, 45-80%, 45-85%, 45-90%, 45-95%, 50-60%, 50-65%, 50-70%, 50-75%, 50-80%, 50-85%, 50-90%, 50-95%, 55-65%, 55-70%, 55-75%, 55-80%, 55-85%, 55-90%, 55-95%, 60-70%, 60-75%, 60-80%, 60-85%, 60-90%, 60-95%, 65-75%, 65-80%, 65-85%, 65-90%, 65-95%, 70-80%, 70-85%, 70-90%, 70-95%, 75-85%, 75-90%, 75-95%, 80-90%, 80-95%, or 90-95%. The reduction of associated neuronal toxicity may be 5%, 10%, 15%, 20%, 25%, 30%, 35%, 40%, 45%, 50%, 55%, 60%, 65%, 70%, 75%, 80%, 85%, 90%, 95%, or more than 95%, 5-15%, 5-20%, 5-25%, 5-30%, 5-35%, 5-40%, 5-45%, 5-50%, 5-55%, 5-60%, 5-65%, 5-70%, 5-75%, 5-80%, 5-85%, 5-90%, 5-95%, 10-20%, 10-25%, 10-30%, 10-35%, 10-40%, 10-45%, 10-50%, 10-55%, 10-60%, 10-65%, 10-70%, 10-75%, 10-80%, 10-85%, 10-90%, 10-95%, 15-25%, 15-30%, 15-35%, 15-40%, 15-45%, 15-50%, 15-55%, 15-60%, 15-65%, 15-70%, 15-75%, 15-80%, 15-85%, 15-90%, 15-95%, 20-30%, 20-35%, 20-40%, 20-45%, 20-50%, 20-55%, 20-60%, 20-65%, 20-70%, 20-75%, 20-80%, 20-85%, 20-90%, 20-95%, 25-35%, 25-40%, 25-45%, 25-50%, 25-55%, 25-60%, 25-65%, 25-70%, 25-75%, 25-80%, 25-85%, 25-90%, 25-95%, 30-40%, 30-45%, 30-50%, 30-55%, 30-60%, 30-65%, 30-70%, 30-75%, 30-80%, 30-85%, 30-90%, 30-95%, 35-45%, 35-50%, 35-55%, 35-60%, 35-65%, 35-70%, 35-75%, 35-80%, 35-85%, 35-90%, 35-95%, 40-50%, 40-55%, 40-60%, 40-65%, 40-70%, 40-75%, 40-80%, 40-85%, 40-90%, 40-95%, 45-55%, 45-60%, 45-65%, 45-70%, 45-75%, 45-80%, 45-85%, 45-90%, 45-95%, 50-60%, 50-65%, 50-70%, 50-75%, 50-80%, 50-85%, 50-90%, 50-95%, 55-65%, 55-70%, 55-75%, 55-80%, 55-85%, 55-90%, 55-95%, 60-70%, 60-75%, 60-80%, 60-85%, 60-90%, 60-95%, 65-75%, 65-80%, 65-85%, 65-90%, 65-95%, 70-80%, 70-85%, 70-90%, 70-95%, 75-85%, 75-90%, 75-95%, 80-90%, 80-95%, or 90-95%.

[0547] In one embodiment, the vectors, e.g., AAV vectors, comprising a nucleic acid sequence encoding the siRNA molecules of the present invention may be used to reduce the cognitive and/or motor decline of a subject with HD, where the amount of decline is determined by a standard evaluation system such as, but not limited to, Unified Huntington's Disease Ratings Scale (UHDRS) and subscores, and cognitive testing.

[0548] In one embodiment, the vectors, e.g., AAV vectors, comprising a nucleic acid sequence encoding the siRNA molecules of the present invention may be used to reduce the decline of functional capacity and activities of daily living as measured by a standard evaluation system such as, but not limited to, the total functional capacity (TFC) scale.

[0549] In some embodiments, the present composition is administered as a solo therapeutic or combination therapeutics for the treatment of HD.

[0550] The vectors, e.g., AAV vectors, encoding siRNA duplexes targeting the HTT gene may be used in combination with one or more other therapeutic agents. By “in combination with,” it is not intended to imply that the agents must be administered at the same time and/or formulated for delivery together, although these methods of delivery are within the scope of the present disclosure. Compositions can be administered concurrently with, prior to, or subsequent to, one or more other desired therapeutics or medical procedures. In general, each agent will be administered at a dose and/or on a time schedule determined for that agent.

[0551] Therapeutic agents that may be used in combination with the vectors, e.g., AAV vectors, encoding the nucleic acid sequence for the siRNA molecules of the present invention can be small molecule compounds which are antioxidants, anti-inflammatory agents, anti-apoptosis agents, calcium regulators, antiglutamatergic agents, structural protein inhibitors, compounds involved in muscle function, and compounds involved in metal ion regulation.

[0552] Compounds tested for treating HD which may be used in combination with the vectors described herein include, but are not limited to, dopamine-depleting agents (e.g., tetrabenazine for chorea), benzodiazepines (e.g., clonazepam for myoclonus, chorea, dystonia, rigidity, and/or spasticity), anticonvulsants (e.g., sodium valproate and levetiracetam for myoclonus), amino acid precursors of dopamine (e.g., levodopa for rigidity which is particularly associate with juvenile HD or young adult-onset parkinsonian phenotype), skeletal muscle relaxants (e.g., baclofen, tizanidine for rigidity and/or spasticity), inhibitors for acetycholine release at the neuromuscular junction to cause muscle paralysis (e.g., botulinum toxin for bruxism and/or dystonia), atypical neuroleptics (e.g., olanzapine and quetiapine for psychosis and/or irritability, risperidone, sulpiride and haloperidol for psychosis, chorea and/or irritability, clozapine for treatment-resistant psychosis, aripiprazole for psychosis with prominent negative symptoms), agents to increase ATP/cellular energetics (e.g., creatine), selective serotonin reuptake inhibitors (SSRIs) (e.g., citalopram, fluoxetine, paroxetine, sertraline, mirtazapine, venlafaxine for depression, anxiety, obsessive compulsive behavior and/or irritability), hypnotics (e.g., xopiclone and/or zolpidem for altered sleep-wake cycle), anticonvulsants (e.g., sodium valproate and carbamazepine for mania or hypomania) and mood stabilizers (e.g., lithium for mania or hypomania).

[0553] Neurotrophic factors may be used in combination therapy with the vectors, e.g., AAV vectors, encoding the nucleic acid sequence for the siRNA molecules of the present invention for treating HD. Generally, a neurotrophic factor is defined as a substance that promotes survival, growth, differentiation, proliferation and/or maturation of a neuron, or stimulates increased activity of a neuron. In some embodiments, the present methods further comprise delivery of one or more trophic factors into the subject in need of treatment. Trophic factors may include, but are not limited to, IGF-I, GDNF, BDNF, CTNF, VEGF, Colivelin, Xaliproden, Thyrotrophin-releasing hormone and ADNF, and variants thereof.

[0554] In one aspect, the vector, e.g., AAV vector, encoding the nucleic acid sequence for the at least one siRNA duplex targeting the HTT gene may be co-administered with AAV vectors expressing neurotrophic factors such as AAV-IGF-I (See e.g., Vincent et al., Neuromolecular medicine, 2004, 6, 79-85; the content of which is incorporated herein by reference in its entirety) and AAV-GDNF (See e.g., Wang et al., J Neurosci., 2002, 22, 6920-6928; the content of which is incorporated herein by reference in its entirety).

[0555] In some embodiments, the composition of the present invention for treating HD is administered to the subject in need intravenously, intramuscularly, subcutaneously, intraperitoneally, intraparenchymally, subpially, intrathecally and/or intraventricularly, allowing the siRNA molecules or vectors comprising the siRNA molecules to pass through one or both the blood-brain barrier and the blood spinal cord barrier, or directly access the brain and/or spinal cord. In some aspects, the method includes administering (e.g., intraparenchymal administration, subpial administration, intraventricular administration and/or intrathecal administration) directly to the central nervous system (CNS) of a subject (using, e.g., an infusion pump and/or a delivery scaffold) a therapeutically effective amount of a composition comprising vectors, e.g., AAV vectors, encoding the nucleic acid sequence for the siRNA molecules of the present invention. The vectors may be used to silence or suppress HTT gene expression, and/or reducing one or more symptoms of HD in the subject such that HD is therapeutically treated.

[0556] In some embodiments, the composition of the present invention for treating HD is administered to the subject in need by intraparenchymal administration.

[0557] In certain aspects, the symptoms of HD include behavioral difficulties and symptoms such as, but not limited to, apathy or lack of initiative, dysphoria, irritability, agitation or anxiety, poor self-care, poor judgment, inflexibility, disinhibition, depression, suicidal ideation euphoria, aggression, delusions, compulsions, hypersexuality, hallucinations, speech deterioration, slurred speech, difficulty swallowing, weight loss, cognitive dysfunction which impairs executive functions (e.g., organizing, planning, checking or adapting alternatives, and delays in the acquisition of new motor skills), unsteady gait and involuntary movements (chorea). In other aspects, the composition of the present invention is applied to one or both of the brain and the spinal cord. In one embodiment, the survival of the subject is prolonged by treating any of the symptoms of HD described herein.

[0558] In one embodiment, administration of the vectors, e.g., AAV vectors encoding a siRNA of the invention, to a subject may lower HTT (e.g., mutant and/or wild-type HTT) in a subject. In one embodiment, administration of the vectors, e.g., AAV vectors, to a subject may lower wild-type HTT in a subject. In one embodiment, administration of the vectors, e.g., AAV vectors, to a subject may lower mutant HTT in a subject. In yet another embodiment, administration of the vectors, e.g., AAV vectors, to a subject may lower both mutant HTT and wild-type HTT in a subject. The mutant and/or wild-type HTT may be lowered by about 20%, 30%, 40%, 50%, 60%, 70%, 80%, 85%, 90%, 95% and 100%, or at least 20-30%, 20-40%, 20-50%, 20-60%, 20-70%, 20-80%, 20-90%, 20-95%, 20-100%, 30-40%, 30-50%, 30-60%, 30-70%, 30-80%, 30-90%, 30-95%, 30-100%, 40-50%, 40-60%, 40-70%, 40-80%, 40-90%, 40-95%, 40-100%, 50-60%, 50-70%, 50-80%, 50-90%, 50-95%, 50-100%, 60-70%, 60-80%, 60-90%, 60-95%, 60-100%, 70-80%, 70-90%, 70-95%, 70-100%, 80-90%, 80-95%, 80-100%, 90-95%, 90-100% or 95-100% in a subject such as, but not limited to, the CNS, a region of the CNS, or a specific cell of the CNS of a subject. As a non-limiting example, the vectors, e.g., AAV vectors may lower the expression of HTT by at least 50% in the medium spiny neurons. As a non-limiting example, the vectors, e.g., AAV vectors may lower the expression of HTT by at least 40% in the medium spiny neurons. As a non-limiting example, the vectors, e.g., AAV vectors may lower the expression of HTT by at least 40% in the medium spiny neurons of the putamen. As a non-limiting example, the vectors, e.g., AAV vectors may lower the expression of HTT by at least 30% in the medium spiny neurons of the putamen. As a non-limiting example, the vectors, e.g., AAV vectors, may lower the expression of HTT by at least 30% in the putamen. As yet another non-limiting example, the vectors, e.g., AAV vectors, may lower the expression of HTT in the putamen and cortex by at least 40%. As yet another non-limiting example, the vectors, e.g., AAV vectors, may lower the expression of HTT in the putamen and cortex by at least 30%. As yet another non-limiting example, the vectors, e.g., AAV vectors, may lower the expression of HTT in the putamen by at least 30% and in the cortex by at least 15%.

[0559] In one embodiment, administration of the vectors, e.g., AAV vectors, to a subject will reduce the expression of HTT in a subject and the reduction of expression of the HTT will reduce the effects of HD in a subject.

[0560] In one embodiment, the vectors, e.g., AAV vectors, may be administered to a subject who has undergone biomarker assessment. Potential biomarkers in blood for premanifest and early progression of HD include, but are not limited to, 8-OHdG oxidative stress marker, metabolic markers (e.g., creatine kinase, branched-chain amino acids), cholesterol metabolites (e.g., 24-OH cholesterol), immune and inflammatory proteins (e.g., clusterin, complement components, interleukins 6 and 8), gene expression changes (e.g., transcriptomic markers), endocrine markers (e.g., cortisol, ghrelin and leptin), BDNF, adenosine 2A receptors. Potential biomarkers for brain imaging for premanifest and early progression of HD include, but are not limited to, striatal volume, subcortical white-matter volume, cortical thickness, whole brain and ventricular volumes, functional imaging (e.g., functional MRI), PET (e.g., with fluorodeoxyglucose), and magnetic resonance spectroscopy (e.g., lactate). Potential biomarkers for quantitative clinical tools for premanifest and early progression of HD include, but are not limited to, quantitative motor assessments, motor physiological assessments (e.g., transcranial magnetic stimulation), and quantitative eye movement measurements. Non-limiting examples of quantitative clinical biomarker assessments include tongue force variability, metronome-guided tapping, grip force, oculomotor assessments and cognitive tests. Non-limiting examples of multicenter observational studies include PREDICT-HD and TRACK-HD. A subject may have symptoms of HD, diagnosed with HD or may be asymptomatic for HD.

[0561] In one embodiment, the vectors, e.g., AAV vectors, may be administered to a subject who has undergone biomarker assessment using neuroimaging. A subject may have symptoms of HD, diagnosed with HD or may be asymptomatic for HD.

[0562] In one embodiment, the vectors, e.g., AAV vectors, may be administered to a subject who is asymptomatic for HD. A subject may be asymptomatic but may have undergone predictive genetic testing or biomarker assessment to determine if they are at risk for HD and/or a subject may have a family member (e.g., mother, father, brother, sister, aunt, uncle, grandparent) who has been diagnosed with HD.

[0563] In one embodiment, the vectors, e.g., AAV vectors, may be administered to a subject who is in the early stages of HD. In the early stage a subject has subtle changes in coordination, some involuntary movements (chorea), changes in mood such as irritability and depression, problem solving difficulties, reduction in the ability of a person to function in their normal day to day life.

[0564] In one embodiment, the vectors, e.g., AAV vectors, may be administered to a subject who is in the middle stages of HD. In the middle stage a subject has an increase in the movement disorder, diminished speech, difficulty swallowing, and ordinary activities will become harder to do. At this stage a subject may have occupational and physical therapists to help maintain control of voluntary movements and a subject may have a speech language pathologist.

[0565] In one embodiment, the vectors, e.g., AAV vectors, may be administered to a subject who is in the late stages of HD. In the late stage, a subject with HD is almost completely or completely dependent on others for care as the subject can no longer walk and is unable to speak. A subject can generally still comprehend language and is aware of family and friends but choking is a major concern.

[0566] In one embodiment, the vectors, e.g., AAV vectors, may be used to treat a subject who has the juvenile form of HD which is the onset of HD before the age of 20 years and as early as 2 years.

[0567] In one embodiment, the vectors, e.g., AAV vectors, may be used to treat a subject with HD who has fully penetrant HD where the HTT gene has 41 or more CAG repeats (e.g., 41, 42, 43, 44, 45, 46, 47, 48, 49, 50, 51, 52, 53, 54, 55, 56, 57, 58, 59, 60, 61, 62, 63, 64, 65, 66, 67, 68, 69, 70, 71, 72, 73, 74, 75, 76, 77, 78, 79, 80, 81, 82, 83, 84, 85, 86, 87, 88, 89, 90 or more than 90 CAG repeats).

[0568] In one embodiment, the vectors, e.g., AAV vectors, may be used to treat a subject with HD who has incomplete penetrance where the HTT gene has between 36 and 40 CAG repeats (e.g., 36, 37, 38, 39 and 40 CAG repeats).

[0569] In one embodiment, the vectors, e.g., AAV vectors, may be used to decrease HTT protein in a subject. The decrease may independently be 5%, 10%, 15%, 20%, 25%, 30%, 35%, 40%, 45%, 50%, 55%, 60%, 65%, 70%, 75%, 80%, 85%, 90%, 95%, or more than 95%, 5-15%, 5-20%, 5-25%, 5-30%, 5-35%, 5-40%, 5-45%, 5-50%, 5-55%, 5-60%, 5-65%, 5-70%, 5-75%, 5-80%, 5-85%, 5-90%, 5-95%, 10-20%, 10-25%, 10-30%, 10-35%, 10-40%, 10-45%, 10-50%, 10-55%, 10-60%, 10-65%, 10-70%, 10-75%, 10-80%, 10-85%, 10-90%, 10-95%, 15-25%, 15-30%, 15-35%, 15-40%, 15-45%, 15-50%, 15-55%, 15-60%, 15-65%, 15-70%, 15-75%, 15-80%, 15-85%, 15-90%, 15-95%, 20-30%, 20-35%, 20-40%, 20-45%, 20-50%, 20-55%, 20-60%, 20-65%, 20-70%, 20-75%, 20-80%, 20-85%, 20-90%, 20-95%, 25-35%, 25-40%, 25-45%, 25-50%, 25-55%, 25-60%, 25-65%, 25-70%, 25-75%, 25-80%, 25-85%, 25-90%, 25-95%, 30-40%, 30-45%, 30-50%, 30-55%, 30-60%, 30-65%, 30-70%, 30-75%, 30-80%, 30-85%, 30-90%, 30-95%, 35-45%, 35-50%, 35-55%, 35-60%, 35-65%, 35-70%, 35-75%, 35-80%, 35-85%, 35-90%, 35-95%, 40-50%, 40-55%, 40-60%, 40-65%, 40-70%, 40-75%, 40-80%, 40-85%, 40-90%, 40-95%, 45-55%, 45-60%, 45-65%, 45-70%, 45-75%, 45-80%, 45-85%, 45-90%, 45-95%, 50-60%, 50-65%, 50-70%, 50-75%, 50-80%, 50-85%, 50-90%, 50-95%, 55-65%, 55-70%, 55-75%, 55-80%, 55-85%, 55-90%, 55-95%, 60-70%, 60-75%, 60-80%, 60-85%, 60-90%, 60-95%, 65-75%, 65-80%, 65-85%, 65-90%, 65-95%, 70-80%, 70-85%, 70-90%, 70-95%, 75-85%, 75-90%, 75-95%, 80-90%, 80-95%, or 90-95%. As a non-limiting example, a subject may have a 50% decrease of HTT protein. As a non-limiting example, a subject may have a decrease of 70% of HTT protein and a decrease of 10% of wild type HTT protein. As a non-limiting example, the decrease of HTT in the medium spiny neurons of the putamen may be about 40%. As a non-limiting example, the decrease of HTT in the putamen and cortex may be about 40%. As a non-limiting example, the decrease of HTT in the putamen maybe about 30% and in the cortex may be about 15%. As a non-limiting example, the decrease of HTT in the putamen and cortex may be about 40%. As a non-limiting example, the decrease of HTT in the medium spiny neurons of the putamen may be between 40%-70%. As a non-limiting example, the decrease of HTT in the putamen and cortex may be between 40%-70%.

[0570] In one embodiment, the vectors, e.g., AAV vectors, may be used to decrease wild type HTT protein in a subject. The decrease may independently be 5%, 10%, 15%, 20%, 25%, 30%, 35%, 40%, 45%, 50%, 55%, 60%, 65%, 70%, 75%, 80%, 85%, 90%, 95%, or more than 95%, 5-15%, 5-20%, 5-25%, 5-30%, 5-35%, 5-40%, 5-45%, 5-50%, 5-55%, 5-60%, 5-65%, 5-70%, 5-75%, 5-80%, 5-85%, 5-90%, 5-95%, 10-20%, 10-25%, 10-30%, 10-35%, 10-40%, 10-45%, 10-50%, 10-55%, 10-60%, 10-65%, 10-70%, 10-75%, 10-80%, 10-85%, 10-90%, 10-95%, 15-25%, 15-30%, 15-35%, 15-40%, 15-45%, 15-50%, 15-55%, 15-60%, 15-65%, 15-70%, 15-75%, 15-80%, 15-85%, 15-90%, 15-95%, 20-30%, 20-35%, 20-40%, 20-45%, 20-50%, 20-55%, 20-60%, 20-65%, 20-70%, 20-75%, 20-80%, 20-85%, 20-90%, 20-95%, 25-35%, 25-40%, 25-45%, 25-50%, 25-55%, 25-60%, 25-65%, 25-70%, 25-75%, 25-80%, 25-85%, 25-90%, 25-95%, 30-40%, 30-45%, 30-50%, 30-55%, 30-60%, 30-65%, 30-70%, 30-75%, 30-80%, 30-85%, 30-90%, 30-95%, 35-45%, 35-50%, 35-55%, 35-60%, 35-65%, 35-70%, 35-75%, 35-80%, 35-85%, 35-90%, 35-95%, 40-50%, 40-55%, 40-60%, 40-65%, 40-70%, 40-75%, 40-80%, 40-85%, 40-90%, 40-95%, 45-55%, 45-60%, 45-65%, 45-70%, 45-75%, 45-80%, 45-85%, 45-90%, 45-95%, 50-60%, 50-65%, 50-70%, 50-75%, 50-80%, 50-85%, 50-90%, 50-95%, 55-65%, 55-70%, 55-75%, 55-80%, 55-85%, 55-90%, 55-95%, 60-70%, 60-75%, 60-80%, 60-85%, 60-90%, 60-95%, 65-75%, 65-80%, 65-85%, 65-90%, 65-95%, 70-80%, 70-85%, 70-90%, 70-95%, 75-85%, 75-90%, 75-95%, 80-90%, 80-95%, or 90-95%. As a non-limiting example, a subject may have a 50% decrease of wild type HTT protein. As a non-limiting example, the decrease of wild type HTT in the medium spiny neurons of the putamen may be about 40%. As a non-limiting example, the decrease of wild type HTT in the medium spiny neurons of the putamen may be about 30%. As a non-limiting example, the decrease of wild type HTT in the medium spiny neurons of the putamen may be about 20%. As a non-limiting example, the decrease of wild type HTT in the medium spiny neurons of the putamen may be about 15%. As a non-limiting example, the decrease of wild type HTT in the putamen and cortex may be about 40%. As a non-limiting example, the decrease of wild type HTT in the putamen and cortex may be about 30%. As a non-limiting example, the decrease of wild type HTT in the putamen and cortex may be about 20%. As a non-limiting example, the decrease of wild type HTT in the putamen and cortex may be about 15%. As a non-limiting example, the decrease of wild type HTT in the medium spiny neurons of the putamen may be between 40%-70%. As a non-limiting example, the decrease of wild type HTT in the medium spiny neurons of the putamen may be between 30%-70%. As a non-limiting example, the decrease of wild type HTT in the medium spiny neurons of the putamen may be between 20%-70%. As a non-limiting example, the decrease of wild type HTT in the medium spiny neurons of the putamen may be between 15%-70%. As a non-limiting example, the decrease of wild type HTT in the putamen and cortex may be between 40%-70%. As a non-limiting example, the decrease of wild type HTT in the medium spiny neurons of the putamen may be between 30%-70%. As a non-limiting example, the decrease of wild type HTT in the medium spiny neurons of the putamen may be between 20%-70%. As a non-limiting example, the decrease of wild type HTT in the medium spiny neurons of the putamen may be between 15%-70%.

[0571] In one embodiment, the vectors, e.g., AAV vectors, may be used to decrease mutant HTT protein in a subject. The decrease may independently be 5%, 10%, 15%, 20%, 25%, 30%, 35%, 40%, 45%, 50%, 55%, 60%, 65%, 70%, 75%, 80%, 85%, 90%, 95%, or more than 95%, 5-15%, 5-20%, 5-25%, 5-30%, 5-35%, 5-40%, 5-45%, 5-50%, 5-55%, 5-60%, 5-65%, 5-70%, 5-75%, 5-80%, 5-85%, 5-90%, 5-95%, 10-20%, 10-25%, 10-30%, 10-35%, 10-40%, 10-45%, 10-50%, 10-55%, 10-60%, 10-65%, 10-70%, 10-75%, 10-80%, 10-85%, 10-90%, 10-95%, 15-25%, 15-30%, 15-35%, 15-40%, 15-45%, 15-50%, 15-55%, 15-60%, 15-65%, 15-70%, 15-75%, 15-80%, 15-85%, 15-90%, 15-95%, 20-30%, 20-35%, 20-40%, 20-45%, 20-50%, 20-55%, 20-60%, 20-65%, 20-70%, 20-75%, 20-80%, 20-85%, 20-90%, 20-95%, 25-35%, 25-40%, 25-45%, 25-50%, 25-55%, 25-60%, 25-65%, 25-70%, 25-75%, 25-80%, 25-85%, 25-90%, 25-95%, 30-40%, 30-45%, 30-50%, 30-55%, 30-60%, 30-65%, 30-70%, 30-75%, 30-80%, 30-85%, 30-90%, 30-95%, 35-45%, 35-50%, 35-55%, 35-60%, 35-65%, 35-70%, 35-75%, 35-80%, 35-85%, 35-90%, 35-95%, 40-50%, 40-55%, 40-60%, 40-65%, 40-70%, 40-75%, 40-80%, 40-85%, 40-90%, 40-95%, 45-55%, 45-60%, 45-65%, 45-70%, 45-75%, 45-80%, 45-85%, 45-90%, 45-95%, 50-60%, 50-65%, 50-70%, 50-75%, 50-80%, 50-85%, 50-90%, 50-95%, 55-65%, 55-70%, 55-75%, 55-80%, 55-85%, 55-90%, 55-95%, 60-70%, 60-75%, 60-80%, 60-85%, 60-90%, 60-95%, 65-75%, 65-80%, 65-85%, 65-90%, 65-95%, 70-80%, 70-85%, 70-90%, 70-95%, 75-85%, 75-90%, 75-95%, 80-90%, 80-95%, or 90-95%. As a non-limiting example, a subject may have a 50% decrease of mutant HTT protein. As a non-limiting example, the decrease of mutant HTT in the medium spiny neurons of the putamen may be about 40%. As a non-limiting example, the decrease of mutant HTT in the medium spiny neurons of the putamen may be about 30%. As a non-limiting example, the decrease of mutant HTT in the medium spiny neurons of the putamen may be about 20%. As a non-limiting example, the decrease of mutant HTT in the medium spiny neurons of the putamen may be about 15%. As a non-limiting example, the decrease of mutant HTT in the putamen and cortex may be about 40%. As a non-limiting example, the decrease of mutant HTT in the putamen and cortex may be about 30%. As a non-limiting example, the decrease of mutant HTT in the putamen and cortex may be about 20%. As a non-limiting example, the decrease of mutant HTT in the putamen and cortex may be about 15%. As a non-limiting example, the decrease of mutant HTT in the medium spiny neurons of the putamen may be between 40%-70%. As a non-limiting example, the decrease of mutant HTT in the medium spiny neurons of the putamen may be between 30%-70%. As a non-limiting example, the decrease of mutant HTT in the medium spiny neurons of the putamen may be between 20%-70%. As a non-limiting example, the decrease of mutant HTT in the medium spiny neurons of the putamen may be between 15%-70%. As a non-limiting example, the decrease of mutant HTT in the putamen and cortex may be between 40%-70%. As a non-limiting example, the decrease of mutant HTT in the medium spiny neurons of the putamen may be between 30%-70%. As a non-limiting example, the decrease of mutant HTT in the medium spiny neurons of the putamen may be between 20%-70%. As a non-limiting example, the decrease of mutant HTT in the medium spiny neurons of the putamen may be between 15%-70%.

[0572] The AAV vectors of the present invention may be used as a method of treating Huntington's disease in a subject in need of treatment. Any method known in the art for defining a subject in need of treatment may be used to identify said subject(s). A subject may have a clinical diagnosis of Huntington's disease, or may be pre-symptomatic. Any known method for diagnosing HD may be utilized, including, but not limited to, cognitive assessments and/or neurological or neuropsychiatric examinations, motor tests, sensory tests, psychiatric evaluations, brain imaging, family history and/or genetic testing.

[0573] In one embodiment, HD subject selection is determined with the use of the Prognostic Index for Huntington's Disease, or a derivative thereof (Long J D et al., Movement Disorders, 2017, 32 (2), 256-263, the contents of which are herein incorporated by reference in their entirety). This prognostic index uses four components to predict probability of motor diagnosis, (1) total motor score (TMS) from the Unified Huntington's Disease Rating Scale (UHDRS), (2) Symbol Digit Modality Test (SDMT), (3) base-line age, and (4) cytosine-adenine-guanine (CAG) expansion.

[0574] In one embodiment, the prognostic index for Huntington's Disease is calculated with the following formula: PI_{HD}=51×TMS+(−34)×SDMT+7×Age×(CAG-34), wherein larger values for PI_{HD} indicate greater risk of diagnosis or onset of symptoms.

[0575] In another embodiment, the prognostic index for Huntington's Disease is calculated with the following normalized formula that gives standard deviation units to be interpreted in the context of 50% 10-year survival: PIN_{HD}=(PI_{HD}−883)/1044, wherein PIN_{HD}<0 indicates greater than 50% 10-year survival, and PIN_{HD}>0 suggests less than 50% 10-year survival.

[0576] In one embodiment, the prognostic index may be used to identify subjects whom will develop symptoms of HD within several years, but that do not yet have clinically diagnosable symptoms. Further, these asymptomatic patients may be selected for and receive treatment using the AAV vectors and compositions of the present invention during the asymptomatic period.

### V. DEFINITIONS

[0577] Unless stated otherwise, the following terms and phrases have the meanings described below. The definitions are not meant to be limiting in nature and serve to provide a clearer understanding of certain aspects of the present invention.

[0578] As used herein, the term “nucleic acid”, “polynucleotide” and ‘oligonucleotide” refer to any nucleic acid polymers composed of either polydeoxyribonucleotides (containing 2-deoxy-D-ribose), or polyribonucleotides (containing D-ribose), or any other type of polynucleotide which is an N glycoside of a purine or pyrimidine base, or modified purine or pyrimidine bases. There is no intended distinction in length between the term “nucleic acid”, “polynucleotide” and “oligonucleotide”, and these terms will be used interchangeably. These terms refer only to the primary structure of the molecule. Thus, these terms include double- and single-stranded DNA, as well as double- and single stranded RNA.

[0579] As used herein, the term “RNA” or “RNA molecule” or “ribonucleic acid molecule” refers to a polymer of ribonucleotides; the term “DNA” or “DNA molecule” or “deoxyribonucleic acid molecule” refers to a polymer of deoxyribonucleotides. DNA and RNA can be synthesized naturally, e.g., by DNA replication and transcription of DNA, respectively; or be chemically synthesized. DNA and RNA can be single-stranded (i.e., ssRNA or ssDNA, respectively) or multi-stranded (e.g., double stranded, i.e., dsRNA and dsDNA, respectively). The term “mRNA” or “messenger RNA”, as used herein, refers to a single stranded RNA that encodes the amino acid sequence of one or more polypeptide chains.

[0580] As used herein, the term “RNA interfering” or “RNAi” refers to a sequence specific regulatory mechanism mediated by RNA molecules which results in the inhibition or interfering or “silencing” of the expression of a corresponding protein-coding gene. RNAi has been observed in many types of organisms, including plants, animals and fungi. RNAi occurs in cells naturally to remove foreign RNAs (e.g., viral RNAs). Natural RNAi proceeds via fragments cleaved from free dsRNA which direct the degradative mechanism to other similar RNA sequences. RNAi is controlled by the RNA-induced silencing complex (RISC) and is initiated by short/small dsRNA molecules in cell cytoplasm, where they interact with the catalytic RISC component argonaute. The dsRNA molecules can be introduced into cells exogenously. Exogenous dsRNA initiates RNAi by activating the ribonuclease protein Dicer, which binds and cleaves dsRNAs to produce double-stranded fragments of 21-25 base pairs with a few unpaired overhang bases on each end. These short double stranded fragments are called small interfering RNAs (siRNAs).

[0581] As used herein, the terms “short interfering RNA,” “small interfering RNA” or “siRNA” refer to an RNA molecule (or RNA analog) comprising between about 5-60 nucleotides (or nucleotide analogs) which is capable of directing or mediating RNAi. Preferably, a siRNA molecule comprises between about 15-30 nucleotides or nucleotide analogs, such as between about 16-25 nucleotides (or nucleotide analogs), between about 18-23 nucleotides (or nucleotide analogs), between about 19-22 nucleotides (or nucleotide analogs) (e.g., 19, 20, 21 or 22 nucleotides or nucleotide analogs), between about 19-25 nucleotides (or nucleotide analogs), and between about 19-24 nucleotides (or nucleotide analogs). The term “short” siRNA refers to a siRNA comprising 5-23 nucleotides, preferably 21 nucleotides (or nucleotide analogs), for example, 19, 20, 21 or 22 nucleotides. The term “long” siRNA refers to a siRNA comprising 24-60 nucleotides, preferably about 24-25 nucleotides, for example, 23, 24, 25 or 26 nucleotides. Short siRNAs may, in some instances, include fewer than 19 nucleotides, e.g., 16, 17 or 18 nucleotides, or as few as 5 nucleotides, provided that the shorter siRNA retains the ability to mediate RNAi. Likewise, long siRNAs may, in some instances, include more than 26 nucleotides, e.g., 27, 28, 29, 30, 35, 40, 45, 50, 55, or even 60 nucleotides, provided that the longer siRNA retains the ability to mediate RNAi or translational repression absent further processing, e.g., enzymatic processing, to a short siRNA. siRNAs can be single stranded RNA molecules (ss-siRNAs) or double stranded RNA molecules (ds-siRNAs) comprising a sense strand and an antisense strand which hybridized to form a duplex structure called siRNA duplex.

[0582] As used herein, the term “the antisense strand” or “the first strand” or “the guide strand” of a siRNA molecule refers to a strand that is substantially complementary to a section of about 10-50 nucleotides, e.g., about 15-30, 16-25, 18-23 or 19-22 nucleotides of the mRNA of the gene targeted for silencing. The antisense strand or first strand has sequence sufficiently complementary to the desired target mRNA sequence to direct target-specific silencing, e.g., complementarity sufficient to trigger the destruction of the desired target mRNA by the RNAi machinery or process.

[0583] As used herein, the term “the sense strand” or “the second strand” or “the passenger strand” of a siRNA molecule refers to a strand that is complementary to the antisense strand or first strand. The antisense and sense strands of a siRNA molecule are hybridized to form a duplex structure. As used herein, a “siRNA duplex” includes a siRNA strand having sufficient complementarity to a section of about 10-50 nucleotides of the mRNA of the gene targeted for silencing and a siRNA strand having sufficient complementarity to form a duplex with the other siRNA strand.

[0584] As used herein, the term “complementary” refers to the ability of polynucleotides to form base pairs with one another. Base pairs are typically formed by hydrogen bonds between nucleotide units in antiparallel polynucleotide strands. Complementary polynucleotide strands can form base pair in the Watson-Crick manner (e.g., A to T, A to U, C to G), or in any other manner that allows for the formation of duplexes. As persons skilled in the art are aware, when using RNA as opposed to DNA, uracil rather than thymine is the base that is considered to be complementary to adenosine. However, when a U is denoted in the context of the present invention, the ability to substitute a T is implied, unless otherwise stated. Perfect complementarity or 100% complementarity refers to the situation in which each nucleotide unit of one polynucleotide strand can form hydrogen bond with a nucleotide unit of a second polynucleotide strand. Less than perfect complementarity refers to the situation in which some, but not all, nucleotide units of two strands can form hydrogen bond with each other. For example, for two 20-mers, if only two base pairs on each strand can form hydrogen bond with each other, the polynucleotide strands exhibit 10% complementarity. In the same example, if 18 base pairs on each strand can form hydrogen bonds with each other, the polynucleotide strands exhibit 90% complementarity.

[0585] As used herein, the term “substantially complementary” means that the siRNA has a sequence (e.g., in the antisense strand) which is sufficient to bind the desired target mRNA, and to trigger the RNA silencing of the target mRNA.

[0586] As used herein, “targeting” means the process of design and selection of nucleic acid sequence that will hybridize to a target nucleic acid and induce a desired effect.

[0587] The term “gene expression” refers to the process by which a nucleic acid sequence undergoes successful transcription and in most instances translation to produce a protein or peptide. For clarity, when reference is made to measurement of “gene expression”, this should be understood to mean that measurements may be of the nucleic acid product of transcription, e.g., RNA or mRNA or of the amino acid product of translation, e.g., polypeptides or peptides. Methods of measuring the amount or levels of RNA, mRNA, polypeptides and peptides are well known in the art.

[0588] As used herein, the term “mutation” refers to any changing of the structure of a gene, resulting in a variant (also called “mutant”) form that may be transmitted to subsequent generations. Mutations in a gene may be caused by the alternation of single base in DNA, or the deletion, insertion, or rearrangement of larger sections of genes or chromosomes.

[0589] As used herein, the term “vector” means any molecule or moiety which transports, transduces or otherwise acts as a carrier of a heterologous molecule such as the siRNA molecule of the invention. A “viral vector” is a vector which comprises one or more polynucleotide regions encoding or comprising a molecule of interest, e.g., a transgene, a polynucleotide encoding a polypeptide or multi-polypeptide or a modulatory nucleic acid such as small interfering RNA (siRNA). Viral vectors are commonly used to deliver genetic materials into cells. Viral vectors are often modified for specific applications. Types of viral vectors include retroviral vectors, lentiviral vectors, adenoviral vectors and adeno-associated viral vectors.

[0590] The term “adeno-associated virus” or “AAV” or “AAV vector” as used herein refers to any vector which comprises or derives from components of an adeno-associated vector and is suitable to infect mammalian cells, preferably human cells. The term AAV vector typically designates an AAV type viral particle or virion comprising a nucleic acid molecule encoding a siRNA duplex. The AAV vector may be derived from various serotypes, including combinations of serotypes (i.e., “pseudotyped” AAV) or from various genomes (e.g., single stranded or self-complementary). In addition, the AAV vector may be replication defective and/or targeted.

[0591] As used herein, the phrase “inhibit expression of a gene” means to cause a reduction in the amount of an expression product of the gene. The expression product can be a RNA molecule transcribed from the gene (e.g., an mRNA) or a polypeptide translated from an mRNA transcribed from the gene. Typically a reduction in the level of an mRNA results in a reduction in the level of a polypeptide translated therefrom. The level of expression may be determined using standard techniques for measuring mRNA or protein.

[0592] As used herein, the term “in vitro” refers to events that occur in an artificial environment, e.g., in a test tube or reaction vessel, in cell culture, in a Petri dish, etc., rather than within an organism (e.g., animal, plant, or microbe).

[0593] As used herein, the term “in vivo” refers to events that occur within an organism (e.g., animal, plant, or microbe or cell or tissue thereof).

[0594] As used herein, the term “modified” refers to a changed state or structure of a molecule of the invention. Molecules may be modified in many ways including chemically, structurally, and functionally.

[0595] As used herein, the term “synthetic” means produced, prepared, and/or manufactured by the hand of man. Synthesis of polynucleotides or polypeptides or other molecules of the present invention may be chemical or enzymatic.

[0596] As used herein, the term “transfection” refers to methods to introduce exogenous nucleic acids into a cell. Methods of transfection include, but are not limited to, chemical methods, physical treatments and cationic lipids or mixtures. The list of agents that can be transfected into a cell is large and includes, but is not limited to, siRNA, sense and/or anti-sense sequences, DNA encoding one or more genes and organized into an expression plasmid, proteins, protein fragments, and more.

[0597] As used herein, “off target” refers to any unintended effect on any one or more target, gene, or cellular transcript.

[0598] As used herein, the phrase “pharmaceutically acceptable” is employed herein to refer to those compounds, materials, compositions, and/or dosage forms which are, within the scope of sound medical judgment, suitable for use in contact with the tissues of human beings and animals without excessive toxicity, irritation, allergic response, or other problem or complication, commensurate with a reasonable benefit/risk ratio.

[0599] As used herein, the term “effective amount” of an agent is that amount sufficient to effect beneficial or desired results, for example, clinical results, and, as such, an “effective amount” depends upon the context in which it is being applied. For example, in the context of administering an agent that treats HD, an effective amount of an agent is, for example, an amount sufficient to achieve treatment, as defined herein, of HD, as compared to the response obtained without administration of the agent.

[0600] As used herein, the term “therapeutically effective amount” means an amount of an agent to be delivered (e.g., nucleic acid, drug, therapeutic agent, diagnostic agent, prophylactic agent, etc.) that is sufficient, when administered to a subject suffering from or susceptible to an infection, disease, disorder, and/or condition, to treat, improve symptoms of, diagnose, prevent, and/or delay the onset of the infection, disease, disorder, and/or condition.

[0601] As used herein, the term “subject” or “patient” refers to any organism to which a composition in accordance with the invention may be administered, e.g., for experimental, diagnostic, prophylactic, and/or therapeutic purposes. Typical subjects include animals (e.g., mammals such as mice, rats, rabbits, non-human primates such as chimpanzees and other apes and monkey species, and humans) and/or plants.

[0602] As used herein, the term “preventing” or “prevention” refers to delaying or forestalling the onset, development or progression of a condition or disease for a period of time, including weeks, months, or years.

[0603] The term “treatment” or “treating,” as used herein, refers to the application of one or more specific procedures used for the cure or amelioration of a disease. In certain embodiments, the specific procedure is the administration of one or more pharmaceutical agents. In the context of the present invention, the specific procedure is the administration of one or more siRNA molecules.

[0604] As used herein, the term “amelioration” or “ameliorating” refers to a lessening of severity of at least one indicator of a condition or disease. For example, in the context of neurodegeneration disorder, amelioration includes the reduction of neuron loss.

[0605] As used herein, the term “administering” refers to providing a pharmaceutical agent or composition to a subject.

[0606] As used herein, the term “neurodegeneration” refers to a pathologic state which results in neural cell death. A large number of neurological disorders share neurodegeneration as a common pathological state. For example, Alzheimer's disease, Parkinson's disease, Huntington's disease, and amyotrophic lateral sclerosis (ALS) all cause chronic neurodegeneration, which is characterized by a slow, progressive neural cell death over a period of several years, whereas acute neurodegeneration is characterized by a sudden onset of neural cell death as a result of ischemia, such as stroke, or trauma, such as traumatic brain injury, or as a result of axonal transection by demyelination or trauma caused, for example, by spinal cord injury or multiple sclerosis. In some neurological disorders, mainly one type of neuronal cell is degenerative, for example, medium spiny neuron degeneration in early HD.

### VI. EQUIVALENTS AND SCOPE

[0607] Those skilled in the art will recognize, or be able to ascertain using no more than routine experimentation, many equivalents to the specific embodiments in accordance with the invention described herein. The scope of the present invention is not intended to be limited to the above Description, but rather is as set forth in the appended claims.

[0608] In the claims, articles such as “a,” “an,” and “the” may mean one or more than one unless indicated to the contrary or otherwise evident from the context. Claims or descriptions that include “or” between one or more members of a group are considered satisfied if one, more than one, or all of the group members are present in, employed in, or otherwise relevant to a given product or process unless indicated to the contrary or otherwise evident from the context. The invention includes embodiments in which exactly one member of the group is present in, employed in, or otherwise relevant to a given product or process. The invention includes embodiments in which more than one, or the entire group members are present in, employed in, or otherwise relevant to a given product or process.

[0609] It is also noted that the term “comprising” is intended to be open and permits but does not require the inclusion of additional elements or steps. When the term “comprising” is used herein, the term “consisting of” is thus also encompassed and disclosed.

[0610] Where ranges are given, endpoints are included. Furthermore, it is to be understood that unless otherwise indicated or otherwise evident from the context and understanding of one of ordinary skill in the art, values that are expressed as ranges can assume any specific value or subrange within the stated ranges in different embodiments of the invention, to the tenth of the unit of the lower limit of the range, unless the context clearly dictates otherwise.

[0611] In addition, it is to be understood that any particular embodiment of the present invention that falls within the prior art may be explicitly excluded from any one or more of the claims. Since such embodiments are deemed to be known to one of ordinary skill in the art, they may be excluded even if the exclusion is not set forth explicitly herein. Any particular embodiment of the compositions of the invention (e.g., any antibiotic, therapeutic or active ingredient; any method of production; any method of use; etc.) can be excluded from any one or more claims, for any reason, whether or not related to the existence of prior art.

[0612] It is to be understood that the words which have been used are words of description rather than limitation, and that changes may be made within the purview of the appended claims without departing from the true scope and spirit of the invention in its broader aspects.

[0613] While the present invention has been described at some length and with some particularity with respect to the several described embodiments, it is not intended that it should be limited to any such particulars or embodiments or any particular embodiment, but it is to be construed with references to the appended claims so as to provide the broadest possible interpretation of such claims in view of the prior art and, therefore, to effectively encompass the intended scope of the invention.

### VII. EXAMPLES

### Example 1. Activity of Constructs in HEK293T and HeLa Cells

### A. Transfection

[0614] The AAV-miRNA expression vectors were transfected into HEK293T and HeLa cells. mCherry-treated cells and untreated cells were also evaluated. After 48 hours, the relative HTT mRNA expression was determined. The relative HTT mRNA expression was obtained by normalizing the HTT mRNA level to the housekeeping gene mRNA level; this normalized HTT mRNA level was then expressed relative to the normalized HTT mRNA level in mCherry-treated and/or untreated cells, as determined by qRT-PCR. The results are shown in Tables 12-14.

TABLE 12
HTT mRNA Suppression in HEK293T and HeLa Cells
after Transfection, Set I

| | | | Relative | |
|---|---|---|---|---|
| | | | HTT mRNA Level | |
| | | Expression | HEK293T | HeLa |
| Name | Duplex ID | Cassette | Cells | Cells |
| VOYHTmiR-102.219.n | D-3513 | 288 | 0.65 | 0.8 |
| VOYHTmiR-102.894 | D-3520 | 299 | 0.55 | 0.76 |
| VOYHTmiR-102.579 | D-3548 | 341 | 0.47 | 0.5 |
| VOYHTmiR-104.219.n | D-3514 | 289 | 0.6 | 0.78 |
| VOYHTmiR-104.894 | D-3521 | 300 | 0.64 | 0.75 |
| VOYHTmiR-104.579 | D-3549 | 342 | 0.5 | 0.51 |
| VOYHTmiR-109.219.n | D-3513 | 290 | 0.63 | 0.75 |
| VOYHTmiR-109.894 | D-3520 | 301 | 0.7 | — |
| VOYHTmiR-109.579 | D-3548 | 343 | 0.55 | 0.52 |
| VOYHTmiR-116.219.n | D-3515 | 291 | 0.63 | 0.75 |
| VOYHTmiR-116.894 | D-3523 | 303 | 0.65 | 0.6 |
| VOYHTmiR-116.579 | D-3551 | 345 | 0.63 | 0.65 |
| VOYHTmiR-114.219 | D-3511 | 285 | 0.6 | 0.65 |
| VOYHTmiR-114.894 | D-3522 | 302 | 0.6 | 0.6 |
| VOYHTmiR-114.579 | D-3550 | 344 | 0.57 | 0.45 |
| VOYHTmiR-127.219.n | D-3513 | 292 | 0.85 | 0.9 |
| VOYHTmiR-127.894 | D-3520 | 304 | 0.58 | 0.5 |
| VOYHTmiR-127.579 | D-3548 | 346 | 0.5 | 0.45 |
| mcherry | N/A | — | 1.0 | 1.0 |
| Untreated | N/A | — | 0.8 | 1.2 |

TABLE 13
HTT mRNA Suppression in HEK293T and HeLa Cells
after Transfection, Set II

| | | | Relative | |
|---|---|---|---|---|
| | | | HTT mRNA Level | |
| | Duplex | Expression | | HeLa |
| Name | ID | Cassette | HEK293T Cells | Cells |
| VOYHTmiR-102.016 | D-3544 | 335 | 0.36 | 0.84 |
| VOYHTmiR-102.214 | D-3500 | 270 | 0.42 | 0.88 |
| VOYHTmiR-102.218 | D-3505 | 276 | 0.31 | 0.68 |
| VOYHTmiR-102.372 | D-3528 | 311 | 0.39 | 0.73 |
| VOYHTmiR-102.425 | D-3532 | 317 | 0.36 | 0.72 |
| VOYHTmiR-102.907 | D-3524 | 305 | 0.43 | 0.75 |
| VOYHTmiR-102.257 | D-3516 | 293 | 0.4 | 0.7 |
| VOYHTmiR-104.016 | D-3545 | 336 | 0.28 | 0.5 |
| VOYHTmiR-104.214 | D-3501 | 271 | 0.55 | 0.91 |
| VOYHTmiR-104.218 | D-3506 | 277 | 0.39 | 0.82 |
| VOYHTmiR-104.372 | D-3529 | 312 | 0.38 | 0.74 |
| VOYHTmiR-104.425 | D-3533 | 318 | 0.4 | 0.7 |
| VOYHTmiR-104.907 | D-3525 | 306 | 0.31 | 0.65 |
| VOYHTmiR-104.257 | D-3517 | 294 | 0.32 | 0.64 |
| VOYHTmiR-109.016 | D-3546 | 337 | 0.28 | 0.5 |
| VOYHTmiR-109.214 | D-3502 | 272 | 0.51 | 0.85 |
| VOYHTmiR-109.218 | D-3507 | 278 | 0.38 | 0.7 |
| VOYHTmiR-109.372 | D-3530 | 313 | 0.42 | 0.72 |
| VOYHTmiR-109.425 | D-3534 | 319 | 00.31 | 0.64 |
| VOYHTmiR-109.907 | D-3526 | 307 | 0.36 | 0.68 |
| VOYHTmiR-109.257 | D-3518 | 295 | 0.41 | 0.72 |
| VOYHTmiR-114.016 | D-3547 | 338 | 0.3 | 0.68 |
| VOYHTmiR-114.214 | D-3503 | 273 | 0.42 | 0.84 |
| VOYHTmiR-114.218 | D-3508 | 279 | 0.38 | 0.75 |
| VOYHTmiR-114.372 | D-3531 | 314 | 0.39 | 0.75 |
| VOYHTmiR-114.425 | D-3535 | 320 | 0.36 | 0.7 |
| VOYHTmiR-114.907 | D-3527 | 308 | 0.4 | 0.61 |
| VOYHTmiR-114.257 | D-3519 | 296 | 0.42 | 0.73 |
| VOYHTmiR-116.016 | D-3546 | 339 | 0.38 | 0.62 |
| VOYHTmiR-116.214 | D-3502 | 274 | 0.5 | 0.87 |
| VOYHTmiR-116.218 | D-3507 | 280 | 0.38 | 0.75 |
| VOYHTmiR-116.372 | D-3530 | 315 | 0.42 | 0.73 |
| VOYHTmiR-116.425 | D-3534 | 321 | 0.43 | 0.85 |
| VOYHTmiR-116.907 | D-3526 | 309 | 0.4 | 0.68 |
| VOYHTmiR-116.257 | D-3518 | 297 | 0.4 | 0.77 |
| VOYHTmiR-127.016 | D-3546 | 340 | 0.29 | 0.4 |
| VOYHTmiR-127.214 | D-3504 | 275 | 0.75 | 1.08 |
| VOYHTmiR-127.218 | D-3507 | 281 | 0.38 | 0.52 |
| VOYHTmiR-127.372 | D-3530 | 316 | 0.39 | 0.5 |
| VOYHTmiR-127.425 | D-3534 | 322 | 0.37 | 0.54 |
| VOYHTmiR-127.907 | D-3526 | 310 | 0.39 | 0.67 |
| VOYHTmiR-127.257 | D-3518 | 298 | 0.38 | 0.45 |
| mcherry | N/A | — | 0.8 | 1.0 |
| Untreated | N/A | — | 0.75 | 0.98 |

TABLE 14
HTT mRNA Suppression in HEK293T and HeLa Cells
after Transfection, Set III

| | | | Relative | |
|---|---|---|---|---|
| | | | HTT mRNA Level | |
| | | Expression | HEK293T | HeLa |
| Name | Duplex ID | Cassette | Cells | Cells |
| VOYHTmiR-104.579 | D-3549 | 342 | 0.18 | 0.62 |
| VOYHTmiR-104.579.1 | D-3566 | 347 | 0.15 | 0.58 |
| VOYHTmiR-104.579.2 | D-3566 | 348 | 0.18 | 0.5 |
| VOYHTmiR-104.579.3 | D-3566 | 349 | 0.15 | 0.52 |
| VOYHTmiR-104.579.4 | D-3566 | 350 | 0.15 | 0.48 |
| VOYHTmiR-104.579.5 | D-3569 | 367 | 0.16 | 0.8 |
| VOYHTmiR-104.579.6 | D-3566 | 351 | 0.11 | 0.5 |
| VOYHTmiR-104.579.7 | D-3567 | 352 | 0.19 | 0.65 |
| VOYHTmiR-104.579.8 | D-3568 | 353 | 0.2 | 0.6 |
| VOYHTmiR-104.579.9 | D-3566 | 354 | 0.19 | 0.73 |
| VOYHTmiR-104.579.10 | D-3570 | 368 | 0.34 | 0.7 |
| mcherry | N/A | — | 1.0 | 1.0 |

### B. Infection

[0615] The AAV-miRNA expression vectors were packaged in AAV2 (referred to as AAV2-miRNA expression vectors) or mCherry vectors were packaged in AAV2, for infection of HEK293T and HeLa cells. Untreated cells were also evaluated. The AAV2 particles were used to infected HEK293T cells at a MOI of 1E4 or 1E5 vg/cell, and HeLa cells at a MOI of 1E5 vg/cell.

[0616] The relative expression of HTT was determined in HeLa cells at 24 hours after AAV-miRNA expression vector infection. The relative HTT mRNA expression was obtained by normalizing the HTT mRNA level to the housekeeping gene mRNA level; this normalized HTT mRNA level was then expressed relative to the normalized HTT mRNA level in mCherry-treated and/or untreated cells, as determined by qRT-PCR. The results are shown in Tables 15-18. The infection of HeLa cells was at a MOI of 1E5 vg/cell (Tables 15-17) or at a MOI of 1E4 vg/cell (Table 18).

[0617] The relative expression of HTT was determined in HEK293T cells at 24 hours after AAV-miRNA expression vector infection. The relative HTT mRNA expression was obtained by normalizing the HTT mRNA level to the housekeeping gene mRNA level; this normalized HTT mRNA level was then expressed relative to the normalized HTT mRNA level in mCherry-treated and/or untreated cells, as determined by qRT-PCR. The results are shown in Tables 15, 17 and 18. The infection of HEK293T cells was at a MOI of 1E5 vg/cell (Tables 15 and 17) or at a MOI of 1E4 vg/cell (Table 18).

TABLE 15
HTT mRNA Suppression in HEK293T and HeLa Cells after
Infection of AAV2-miRNA Expression Vectors at MOI of 1E5/Cell

| | | | Relative | |
|---|---|---|---|---|
| | | | HTT mRNA Level | |
| | | Expression | HEK293T | HeLa |
| Name | Duplex ID | Cassette | Cells | Cells |
| VOYHTmiR-102.219.n | D-3513 | 288 | 0.8 | 0.79 |
| VOYHTmiR-102.894 | D-3520 | 299 | 0.7 | 0.71 |
| VOYHTmiR-102.579 | D-3548 | 341 | 0.49 | 0.7 |
| VOYHTmiR-104.219.n | D-3514 | 289 | 0.9 | 0.81 |
| VOYHTmiR-104.894 | D-3521 | 300 | 0.8 | 0.71 |
| VOYHTmiR-104.579 | D-3549 | 342 | 0.4 | 0.48 |
| VOYHTmiR-109.219.n | D-3513 | 290 | 0.79 | 0.8 |
| VOYHTmiR-109.894 | D-3520 | 301 | 0.6 | 0.71 |
| VOYHTmiR-109.579 | D-3548 | 343 | 0.58 | 0.61 |
| VOYHTmiR-116.219.n | D-3515 | 291 | 0.95 | 0.81 |
| VOYHTmiR-116.894 | D-3523 | 303 | 0.75 | 0.75 |
| VOYHTmiR-116.579 | D-3551 | 345 | 0.5 | 0.7 |
| VOYHTmiR-114.219 | D-3511 | 285 | 0.74 | 0.81 |
| VOYHTmiR-114.894 | D-3522 | 302 | 0.6 | 0.75 |
| VOYHTmiR-114.579 | D-3550 | 344 | 0.43 | 0.61 |
| VOYHTmiR-127.219.n | D-3513 | 292 | 0.93 | 0.9 |
| VOYHTmiR-127.894 | D-3520 | 304 | 0.5 | 0.6 |
| VOYHTmiR-127.579 | D-3548 | 346 | 0.31 | 0.4 |
| mCherry | N/A | — | 1.0 | 1.0 |
| Untreated | N/A | — | 0.9 | 0.9 |

TABLE 16
HTT mRNA Suppression in HeLa Cells after
Infection of AAV2-miRNA Expression Vectors at MOI of 1E5/Cell

| | | | Relative |
|---|---|---|---|
| | Duplex | Expression | HTT mRNA Level |
| Name | ID | Cassette | HeLa Cells |
| VOYHTmiR-102.016 | D-3544 | 335 | 0.52 |
| VOYHTmiR-102.214 | D-3500 | 270 | 0.9 |
| VOYHTmiR-102.218 | D-3505 | 276 | 0.88 |
| VOYHTmiR-102.372 | D-3528 | 311 | 0.89 |
| VOYHTmiR-102.425 | D-3532 | 317 | 0.8 |
| VOYHTmiR-102.907 | D-3524 | 305 | 0.74 |
| VOYHTmiR-102.257 | D-3516 | 293 | 0.79 |
| VOYHTmiR-104.016 | D-3545 | 336 | 0.57 |
| VOYHTmiR-104.218 | D-3506 | 277 | 0.79 |
| VOYHTmiR-104.372 | D-3529 | 312 | 0.79 |
| VOYHTmiR-104.425 | D-3533 | 318 | 0.67 |
| VOYHTmiR-104.907 | D-3525 | 306 | 0.71 |
| VOYHTmiR-104.257 | D-3517 | 294 | 0.72 |
| VOYHTmiR-109.016 | D-3546 | 337 | 0.6 |
| VOYHTmiR-109.218 | D-3507 | 278 | 0.83 |
| VOYHTmiR-109.372 | D-3530 | 313 | 0.85 |
| VOYHTmiR-109.425 | D-3534 | 319 | 0.75 |
| VOYHTmiR-109.907 | D-3526 | 307 | 0.8 |
| VOYHTmiR-109.257 | D-3518 | 295 | 0.9 |
| VOYHTmiR-114.016 | D-3547 | 338 | 0.68 |
| VOYHTmiR-114.214 | D-3503 | 273 | 0.99 |
| VOYHTmiR-114.372 | D-3531 | 314 | 0.85 |
| VOYHTmiR-116.016 | D-3546 | 339 | 0.59 |
| VOYHTmiR-116.218 | D-3507 | 280 | 0.81 |
| VOYHTmiR-127.016 | D-3546 | 340 | 0.3 |
| VOYHTmiR-127.214 | D-3504 | 275 | 1.0 |
| VOYHTmiR-127.218 | D-3507 | 281 | 0.4 |
| VOYHTmiR-127.372 | D-3530 | 316 | 0.48 |
| VOYHTmiR-127.425 | D-3534 | 322 | 0.5 |
| VOYHTmiR-127.907 | D-3526 | 310 | 0.55 |
| VOYHTmiR-127.257 | D-3518 | 298 | 0.42 |
| mCherry | N/A | — | 1.0 |
| Untreated | N/A | — | 0.93 |

TABLE 17
HTT mRNA Suppression in HEK293T and HeLa Cells after
Infection of AAV2-miRNA Expression Vectors at MOI of 1E5/Cell

| | | | Relative | |
|---|---|---|---|---|
| | | | HTT mRNA Level | |
| | | Expression | HEK293T | HeLa |
| Name | Duplex ID | Cassette | Cells | Cells |
| VOYHTmiR-104.579 | D-3549 | 342 | 0.4 | 0.5 |
| VOYHTmiR-104.579.1 | D-3566 | 347 | 0.38 | 0.51 |
| VOYHTmiR-104.579.3 | D-3566 | 349 | 0.35 | 0.3 |
| VOYHTmiR-104.579.5 | D-3569 | 367 | 0.7 | 0.75 |
| VOYHTmiR-104.579.7 | D-3567 | 352 | 0.35 | 0.45 |
| VOYHTmiR-104.579.9 | D-3566 | 354 | 0.35 | 0.48 |
| VOYHTmiR-104.579.10 | D-3570 | 368 | 0.31 | 0.3 |
| mCherry | N/A | — | 1.0 | 1.0 |

TABLE 18
HTT mRNA Suppression in HEK293T and HeLa Cells after
Infection of AAV2-miRNA Expression Vectors at MOI of 1E4/Cell

| | | | Relative | |
|---|---|---|---|---|
| | | | HTT mRNA Level | |
| | Duplex | Expression | HEK293T | |
| Name | ID | Cassette | Cells | HeLa Cells |
| VOYHTmiR-102.016 | D-3544 | 335 | 0.5 | 0.51 |
| VOYHTmiR-102.214 | D-3500 | 270 | 1.08 | 0.9 |
| VOYHTmiR-102.218 | D-3505 | 276 | 0.82 | 0.9 |
| VOYHTmiR-102.372 | D-3528 | 311 | 0.9 | 0.9 |
| VOYHTmiR-102.425 | D-3532 | 317 | 0.7 | 0.8 |
| VOYHTmiR-102.907 | D-3524 | 305 | 0.7 | 0.71 |
| VOYHTmiR-102.257 | D-3516 | 293 | 0.7 | 0.8 |
| VOYHTmiR-104.016 | D-3545 | 336 | 0.51 | 0.59 |
| VOYHTmiR-104.218 | D-3506 | 277 | 0.8 | 0.8 |
| VOYHTmiR-104.372 | D-3529 | 312 | 0.8 | 0.8 |
| VOYHTmiR-104.425 | D-3533 | 318 | 0.6 | 0.65 |
| VOYHTmiR-104.907 | D-3525 | 306 | 0.7 | 0.7 |
| VOYHTmiR-104.257 | D-3517 | 294 | 0.85 | 0.71 |
| VOYHTmiR-109.016 | D-3546 | 337 | 0.5 | 0.6 |
| VOYHTmiR-109.218 | D-3507 | 278 | 0.8 | 0.81 |
| VOYHTmiR-109.372 | D-3530 | 313 | 0.91 | 0.88 |
| VOYHTmiR-109.425 | D-3534 | 319 | 0.7 | 0.71 |
| VOYHTmiR-109.907 | D-3526 | 307 | 0.85 | 0.8 |
| VOYHTmiR-109.257 | D-3518 | 295 | 0.85 | 0.91 |
| VOYHTmiR-114.016 | D-3547 | 338 | 0.6 | 0.68 |
| VOYHTmiR-114.214 | D-3503 | 273 | 1.1 | 0.98 |
| VOYHTmiR-114.372 | D-3531 | 314 | 0.82 | 0.88 |
| VOYHTmiR-116.016 | D-3546 | 339 | 0.69 | 0.59 |
| VOYHTmiR-116.218 | D-3507 | 280 | 0.91 | 0.81 |
| VOYHTmiR-127.016 | D-3546 | 340 | 0.39 | 0.3 |
| VOYHTmiR-127.214 | D-3504 | 275 | 1.2 | 1.0 |
| VOYHTmiR-127.218 | D-3507 | 281 | 0.41 | 0.41 |
| VOYHTmiR-127.372 | D-3530 | 316 | 0.5 | 0.5 |
| VOYHTmiR-127.425 | D-3534 | 322 | 0.58 | 0.57 |
| VOYHTmiR-127.907 | D-3526 | 310 | 0.6 | 0.59 |
| VOYHTmiR-127.257 | D-3518 | 298 | 0.5 | 0.41 |
| mCherry | N/A | — | 1.0 | 1.1 |
| Untreated | N/A | — | 1.08 | 0.98 |

[0618] In HEK293T cells, VOYHTmiR-127.016 provided a relative HTT mRNA level of 0.3-0.4; VOYHTmiR-127.218, VOYHTmiR-102.016, VOYHTmiR-109.016, VOYHTmiR-127.372, and VOYHTmiR-127.257 provided a relative HTT mRNA level of 0.41-0.5; VOYHTmiR-104.016, VOYHTmiR-127.425, VOYHTmiR-104.425, VOYHTmiR-114.016, and VOYHTmiR-127.907 provided a relative HTT mRNA level of 0.51-0.6; VOYHTmiR-116.016, VOYHTmiR-102.425, VOYHTmiR-102.907, VOYHTmiR-102.257, VOYHTmiR-104.907, and VOYHTmiR-109.425 provided a relative HTT mRNA level of 0.61-0.7; VOYHTmiR-104.218, VOYHTmiR-104.372, and VOYHTmiR-109.218 provided a relative HTT mRNA level of 0.71-0.8; VOYHTmiR-102.218, VOYHTmiR-114.372, VOYHTmiR-104.257, VOYHTmiR-109.907, VOYHTmiR-109.257, and VOYHTmiR-102.372 provided a relative HTT mRNA level of 0.81-0.9; VOYHTmiR-109.372, and VOYHTmiR-116.218 provided a relative HTT mRNA level of 0.91 24 hours after infection at a MOI of 1E4 vg/cell.

[0619] In HEK293T cells, VOYHTmiR-127.579, VOYHTmiR-104.579.10, VOYHTmiR-104.579.3, VOYHTmiR-104.579.7, VOYHTmiR-104.579.9, VOYHTmiR-104.579.1, and VOYHTmiR-104.579 provided a relative HTT mRNA level of 0.3-0.4; VOYHTmiR-114.579, VOYHTmiR-102.579, VOYHTmiR-116.579, and VOYHTmiR-127.894 provided a relative HTT mRNA level of 0.41-0.5; VOYHTmiR-109.579, VOYHTmiR-109.894, and VOYHTmiR-114.894 provided a relative HTT mRNA level of 0.51-0.6; VOYHTmiR-102.894, and VOYHTmiR-104.579.5 provided a relative HTT mRNA level of 0.61-0.7; VOYHTmiR-114.219, VOYHTmiR-116.894, VOYHTmiR-109.219.n, VOYHTmiR-102.219.n, and VOYHTmiR-104.894 provided a relative HTT mRNA level of 0.71-0.8; VOYHTmiR-104.219.n provided a relative HTT mRNA level of 0.81-0.9; VOYHTmiR-127.219.n, and VOYHTmiR-116.219.n provided a relative HTT mRNA level of 0.91-0.95 24 hours after infection at a MOI of 1E5 vg/cell.

[0620] In HeLa cells, VOYHTmiR-127.016 provided a relative HTT mRNA level of 0.3-0.4; VOYHTmiR-127.218, VOYHTmiR-127.257, and VOYHTmiR-127.372 provided a relative HTT mRNA level of 0.41-0.5; VOYHTmiR-102.016, VOYHTmiR-127.425, VOYHTmiR-104.016, VOYHTmiR-127.907, VOYHTmiR-116.016, and VOYHTmiR-109.016 provided a relative HTT mRNA level of 0.51-0.6; VOYHTmiR-104.425, VOYHTmiR-114.016, and VOYHTmiR-104.907 provided a relative HTT mRNA level of 0.61-0.7; VOYHTmiR-102.907, VOYHTmiR-109.425, VOYHTmiR-104.257, VOYHTmiR-102.425, VOYHTmiR-102.257, VOYHTmiR-104.218, VOYHTmiR-104.372, and VOYHTmiR-109.907 provided a relative HTT mRNA level of 0.71-0.8; VOYHTmiR-109.218, VOYHTmiR-116.218, VOYHTmiR-114.372, VOYHTmiR-109.372, VOYHTmiR-102.218, VOYHTmiR-102.372, and VOYHTmiR-102.214 provided a relative HTT mRNA level of 0.81-0.9; VOYHTmiR-109.257, VOYHTmiR-114.214, and VOYHTmiR-127.214 provided a relative HTT mRNA level of 0.91-1 24 hours after infection at a MOI of 1E4 vg/cell.

[0621] In Hela cells, VOYHTmiR-127.016, VOYHTmiR-104.579.3, VOYHTmiR-104.579.10, VOYHTmiR-127.218, and VOYHTmiR-127.579 provided a relative HTT mRNA level of 0.3-0.4; VOYHTmiR-127.257, VOYHTmiR-104.579.7, VOYHTmiR-127.372, VOYHTmiR-104.579, VOYHTmiR-104.579.9, and VOYHTmiR-127.425 provided a relative HTT mRNA level of 0.41-0.5; VOYHTmiR-104.579.1, VOYHTmiR-102.016, VOYHTmiR-127.907, VOYHTmiR-104.016, VOYHTmiR-116.016, VOYHTmiR-109.016, and VOYHTmiR-127.894 provided a relative HTT mRNA level of 0.51-0.6; VOYHTmiR-109.579, VOYHTmiR-114.579, VOYHTmiR-104.425, VOYHTmiR-114.016, VOYHTmiR-102.579, and VOYHTmiR-116.579 provided a relative HTT mRNA level of 0.61-0.7; VOYHTmiR-104.907, VOYHTmiR-102.894, VOYHTmiR-104.894, VOYHTmiR-109.894, VOYHTmiR-104.257, VOYHTmiR-102.907, VOYHTmiR-109.425, VOYHTmiR-116.894, VOYHTmiR-114.894, VOYHTmiR-104.579.5, VOYHTmiR-102.257, VOYHTmiR-104.218, VOYHTmiR-104.372, VOYHTmiR-102.219.n, VOYHTmiR-102.425, VOYHTmiR-109.907, and VOYHTmiR-109.219.n provided a relative HTT mRNA level of 0.71-0.8; VOYHTmiR-116.218, VOYHTmiR-104.219.n, VOYHTmiR-116.219.n, VOYHTmiR-114.219, VOYHTmiR-109.218, VOYHTmiR-109.372, VOYHTmiR-114.372, VOYHTmiR-102.218, VOYHTmiR-102.372, VOYHTmiR-102.214, VOYHTmiR-109.257, and VOYHTmiR-127.219.n provided a relative HTT mRNA level of 0.81-0.9; VOYHTmiR-114.214 and VOYHTmiR-127.214 provided a relative HTT mRNA level of 0.91-1 24 hours after infection at a MOI of 1E5 vg/cell.

### Example 2. Activity of Constructs in Human Normal Primary Astrocytes, U251 MG Cells, Neuronally Differentiated SH-SY5Y Cells, and Human HD Fibroblasts

[0622] The AAV-miRNA expression vectors were packaged in AAV2, and infected into human normal primary astrocytes NHA (Lonza) (cultured in AGM™ Astrocyte Growth Medium, Lonza Cat #CC-3186), human astrocyte cell line U251 MG (Sigma Cat #09063001-IVL) (cultured in DMEM/F-12 containing 2 mM GLUAMAX™ supplement, 1×MEM Non-Essential Amino Acids Solution, 10 mM HEPES and 10% FBS, 2 ng/ml human FGF-2 and 5 ug/ml human insulin, all reagents from Life Technologies), neuronally differentiated SH-SY5Y cells (Sigma Cat #94030304) (cultured in DMEM/F-12 containing 2 mM GLUAMAX™ supplement, 1×MEM Non-Essential Amino Acids Solution, 10 mM HEPES and 10% FBS, 2 ng/ml human FGF-2 and 5 ug/ml human insulin, all reagents from Life Technologies) and/or human HD primary fibroblasts (Coriell Institute Cat #GM21756) (cultured in DMEM/F-12 containing 2 mM GLUAMAX™ supplement, 1×MEM Non-Essential Amino Acids Solution, 10 mM HEPES and 10% FBS, 2 ng/ml human FGF-2 and 5 ug/ml human insulin, all reagents from Life Technologies). A control of mCherry was also evaluated. For NHA, fibroblasts and U251 MG the cells were plated into 96-well plates (1-2E4 cells/well in 200 ul cell culture medium) and infected in triplicate with AAV-miRNA expression vectors or the control mCherry vector packaged in AAV2. The SH-SY5Y cells were plated into 96-well plates (1E4 cells/well in 200 ul cell culture medium) that were double coated with 0.1 ug/ml Poly-D-lysine and 15 ug/ml laminin, induced for neuronal differentiation in differentiation medium for 4 days, and then infected in triplicate with AAV2-miRNA expression vectors. The AAV2-miRNA expression vectors were infected at a MOI of 1E5 or 1E6 vg/cell. 24-48 hours after infection, the cells were harvested for immediate cell lysis and qRT-PCR.

A. HTT Suppression at 24 Hours after Infection at MOI of 1E5 vg/Cell

[0623] The relative expression of HTT mRNA 24 hours after infection at a MOI of 1E5 vg/cell was determined by qRT-PCR for the normal human primary astrocytes, human astrocyte cell line U251 MG, SH-SY5Y differentiated neurons, and human HD primary fibroblasts. The relative HTT mRNA expression was obtained by normalizing the HTT mRNA level to the housekeeping gene mRNA level as determined by qRT-PCR; this normalized HTT mRNA level was then expressed relative to the normalized HTT mRNA level in mCherry-treated cells. The results are shown in Table 19.

TABLE 19
HTT mRNA Suppression in Normal Primary Human Astrocytes, U251MG Cells, Neuronally
Differentiated SH-SY5Y Cells and Human HD Fibroblasts at 24 hours after Infection of
AAV2-miRNA Expression Vectors at a MOI of 1E5 vg/cell

| | | | Relative HTT mRNA Level (%) (normalized to mCherry) | | | |
|---|---|---|---|---|---|---|
| | | | Human Primary | | | |
| | Duplex | Expression | Astrocytes | | | HD |
| Name | ID | Cassette | (NHA) | U251MG | SH-SY5Y | Fibroblast |
| VOYHTmiR-102.219.n | D-3513 | 288 | 103 | 119 | 91 | 102 |
| VOYHTmiR-102.894 | D-3520 | 299 | 102 | 102 | 82 | 100 |
| VOYHTmiR-102.579 | D-3548 | 341 | 105 | 102 | 101 | 86 |
| VOYHTmiR-104.219.n | D-3514 | 289 | 91 | 111 | 90 | 121 |
| VOYHTmiR-104.894 | D-3521 | 300 | 98 | 112 | 103 | 104 |
| VOYHTmiR-104.579 | D-3549 | 342 | 102 | 79 | 79 | 88 |
| VOYHTmiR-109.219.n | D-3513 | 290 | 89 | 96 | 89 | 78 |
| VOYHTmiR-109.894 | D-3520 | 301 | 89 | 102 | 77 | 91 |
| VOYHTmiR-109.579 | D-3548 | 343 | 82 | 82 | 71 | 78 |
| VOYHTmiR-116.219.n | D-3515 | 291 | 81 | 90 | 95 | 79 |
| VOYHTmiR-116.894 | D-3523 | 303 | 94 | 86 | 80 | 70 |
| VOYHTmiR-116.579 | D-3551 | 345 | 108 | 95 | 98 | 100 |
| VOYHTmiR-114.219 | D-3511 | 285 | 91 | 105 | 95 | 106 |
| VOYHTmiR-114.894 | D-3522 | 302 | 100 | 85 | 82 | 81 |
| VOYHTmiR-114.579 | D-3550 | 344 | 100 | 77 | 70 | 80 |
| VOYHTmiR-127.219.n | D-3513 | 292 | 89 | 90 | 86 | 81 |
| VOYHTmiR-127.894 | D-3520 | 304 | 80 | 79 | 69 | 80 |
| VOYHTmiR-127.579 | D-3548 | 346 | 79 | 61 | 54 | 73 |
| VOYHTmiR-102.214 | D-3500 | 270 | 78 | 80 | 91 | 81 |
| VOYHTmiR-102.016 | D-3544 | 335 | 70 | 51 | 51 | 77 |
| VOYHTmiR-102.218 | D-3505 | 276 | 92 | 100 | 92 | 115 |
| VOYHTmiR-102.372 | D-3528 | 311 | 90 | 99 | 118 | 120 |
| VOYHTmiR-102.425 | D-3532 | 317 | 95 | 85 | 103 | 114 |
| VOYHTmiR-102.907 | D-3524 | 305 | 84 | 69 | 85 | 84 |
| VOYHTmiR-102.257 | D-3516 | 293 | 124 | 72 | 73 | 90 |
| VOYHTmiR-104.016 | D-3545 | 336 | 115 | 75 | 65 | 85 |
| VOYHTmiR-104.218 | D-3506 | 277 | 119 | 78 | 85 | 88 |
| VOYHTmiR-104.372 | D-3529 | 312 | 101 | 95 | 96 | 90 |
| VOYHTmiR-104.425 | D-3533 | 318 | 126 | 81 | 76 | 95 |
| VOYHTmiR-104.907 | D-3525 | 306 | 121 | 75 | 79 | 110 |
| VOYHTmiR-104.257 | D-3517 | 294 | 110 | 77 | 81 | 90 |
| VOYHTmiR-109.016 | D-3546 | 337 | 81 | 67 | 70 | 79 |
| VOYHTmiR-109.218 | D-3507 | 278 | 96 | 68 | 73 | 80 |
| VOYHTmiR-109.372 | D-3530 | 313 | 102 | 81 | 73 | 77 |
| VOYHTmiR-109.425 | D-3534 | 319 | 98 | 74 | 71 | 82 |
| VOYHTmiR-109.907 | D-3526 | 307 | 88 | 80 | 80 | 82 |
| VOYHTmiR-109.257 | D-3518 | 295 | 120 | 89 | 94 | 95 |
| VOYHTmiR-114.016 | D-3547 | 338 | 100 | 73 | 65 | 95 |
| VOYHTmiR-114.214 | D-3501 | 273 | 114 | 97 | 100 | 88 |
| VOYHTmiR-114.372 | D-3531 | 314 | 90 | 83 | 77 | 79 |
| VOYHTmiR-116.016 | D-3546 | 339 | 87 | 57 | 51 | 79 |
| VOYHTmiR-116.218 | D-3508 | 280 | 100 | 77 | 74 | 75 |
| VOYHTmiR-127.016 | D-3546 | 340 | 62 | 30 | 40 | 61 |
| VOYHTmiR-127.214 | D-3504 | 275 | 92 | 97 | 100 | 69 |
| VOYHTmiR-127.218 | D-3507 | 281 | 81 | 42 | 49 | 72 |
| VOYHTmiR-127.372 | D-3530 | 316 | 90 | 50 | 64 | 83 |
| VOYHTmiR-127.425 | D-3534 | 322 | 97 | 68 | 69 | 81 |
| VOYHTmiR-127.907 | D-3526 | 310 | 79 | 57 | 62 | 70 |
| VOYHTmiR-127.257 | D-3518 | 298 | 78 | 63 | 52 | 61 |
| mCherry | N/A | — | 100 | 100 | 100 | 100 |

[0624] In normal human primary astrocytes, VOYHTmiR-102.016 and VOYHTmiR-127.016 caused about 30-40% silencing of HTT mRNA 24 hours after infection at a MOI of 1E5 vg/cell.

[0625] In the human astrocyte cell line U251 MG, VOYHTmiR-127.579, VOYHTmiR-102.907, VOYHTmiR-102.257, VOYHTmiR-109.016, VOYHTmiR-109.218, VOYHTmiR-114.016, VOYHTmiR-127.425 and VOYHTmiR-127.257 cause about 30-40% silencing; VOYHTmiR-102.016, VOYHTmiR-127.372, VOYHTmiR-116.016 and VOYHTmiR-127.907 cause 41-50% silencing; VOYHTmiR-127.218 causes 51-60% silencing; and VOYHTmiR-127.016 causes 61-70% silencing of HTT mRNA 24 hours after infection at a MOI of 1E5 vg/cell.

[0626] In SH-SY5Y differentiated neurons, VOYHTmiR-109.579, VOYHTmiR-114.579, VOYHTmiR-127.894, VOYHTmiR-102.257, VOYHTmiR-104.016, VOYHTmiR-109.016, VOYHTmiR-109.218, VOYHTmiR-109.372, VOYHTmiR-109.425, VOYHTmiR-114.016, VOYHTmiR-127.372, VOYHTmiR-127.425 and VOYHTmiR-127.907 cause about 30-40% silencing; VOYHTmiR-127.579, VOYHTmiR-102.016, VOYHTmiR-116.016 and VOYHTmiR-127.257 cause about 41-50% silencing; and VOYHTmiR-127.016 and VOYHTmiR-127.218 cause about 51-60% silencing of Htt mRNA 24 hours after infection at a MOI of 1E5 vg/cell.

[0627] In human HD fibroblasts, VOYHTmiR-116.894, VOYHT-miR-127.579, VOYHTmiR-127.016, VOYHTmiR-127.214, VOYHTmiR-127.218, VOYHTmiR-127.907 and VOYHTmiR-127.257 cause about 30-40% silencing of Htt mRNA 24 hours after infection at a MOI of 1E5 vg/cell.

B. HTT Suppression at 24 Hours after Infection at MOI of 1E6 vg/Cell

[0628] The relative expression of HTT mRNA 24 hours after infection at a MOI of 1E6, was determined by qRT-PCR for the human astrocyte cell line U251 MG and neuronally differentiated SH-SY5Y cells. The relative HTT mRNA expression was obtained by normalizing the HTT mRNA level to the housekeeping gene mRNA level as determined by qRT-PCR; this normalized HTT mRNA level was then expressed relative to the normalized HTT mRNA level in mCherry-treated cells. The results are shown in Table 20.

TABLE 20
HTT mRNA Suppression in U251MG Cells and Neuronally Differentiated
SH-SY5Y Cells at 24 hours after infection with a MOI of 1E6 vg/cell

| | | | Relative HTT mRNA | |
|---|---|---|---|---|
| | | | Level (%) | |
| | | | (normalized | |
| | Duplex | Expression | to XPNPEP1) | |
| Name | ID | Cassette | U251MG | SH-SY5Y |
| VOYHTmiR-102.219.n | D-3513 | 288 | 113 | 69 |
| VOYHTmiR-102.894 | D-3520 | 299 | 113 | 58 |
| VOYHTmiR-102.579 | D-3548 | 341 | 79 | 56 |
| VOYHTmiR-104.219.n | D-3514 | 289 | 119 | 80 |
| VOYHTmiR-104.894 | D-3521 | 300 | 125 | 69 |
| VOYHTmiR-104.579 | D-3549 | 342 | 69 | 46 |
| VOYHTmiR-109.219.n | D-3513 | 290 | 111 | 70 |
| VOYHTmiR-109.894 | D-3520 | 301 | 80 | 57 |
| VOYHTmiR-109.579 | D-3548 | 343 | 65 | 50 |
| VOYHTmiR-116.219.n | D-3515 | 291 | 92 | 70 |
| VOYHTmiR-116.894 | D-3523 | 303 | 86 | 60 |
| VOYHTmiR-116.579 | D-3551 | 345 | 90 | 60 |
| VOYHTmiR-114.219 | D-3511 | 285 | 108 | 68 |
| VOYHTmiR-114.894 | D-3522 | 302 | 83 | 57 |
| VOYHTmiR-114.579 | D-3550 | 344 | 60 | 42 |
| VOYHTmiR-127.219.n | D-3513 | 292 | 102 | 87 |
| VOYHTmiR-127.894 | D-3520 | 304 | 61 | 47 |
| VOYHTmiR-127.579 | D-3548 | 346 | 48 | 42 |
| VOYHTmiR-102.214 | D-3500 | 270 | 78 | 115 |
| VOYHTmiR-102.016 | D-3544 | 335 | 48 | 45 |
| VOYHTmiR-102.218 | D-3505 | 276 | 100 | 90 |
| VOYHTmiR-102.372 | D3528 | 311 | 78 | 97 |
| VOYHTmiR-102.425 | D-3532 | 317 | 69 | 90 |
| VOYHTmiR-102.907 | D-3524 | 305 | 58 | 108 |
| VOYHTmiR-102.257 | D-3516 | 293 | 68 | 69 |
| VOYHTmiR-104.016 | D-3545 | 336 | 51 | 45 |
| VOYHTmiR-104.218 | D-3506 | 277 | 60 | 63 |
| VOYHTmiR-104.372 | D-3529 | 312 | 78 | 79 |
| VOYHTmiR-104.425 | D-3533 | 318 | 60 | 58 |
| VOYHTmiR-104.907 | D-3525 | 306 | 68 | 67 |
| VOYHTmiR-104.257 | D-3517 | 294 | 70 | 57 |
| VOYHTmiR-109.016 | D-3546 | 337 | 49 | 55 |
| VOYHTmiR-109.218 | D-3507 | 278 | 65 | 61 |
| VOYHTmiR-109.372 | D-3530 | 313 | 82 | 58 |
| VOYHTmiR-109.425 | D-3534 | 319 | 70 | 59 |
| VOYHTmiR-109.907 | D-3526 | 307 | 69 | 65 |
| VOYHTmiR-109.257 | D-3518 | 295 | 75 | 61 |
| VOYHTmiR-114.016 | D-3547 | 338 | 63 | 48 |
| VOYHTmiR-114.214 | D-3501 | 273 | 81 | 90 |
| VOYHTmiR-114.372 | D-3531 | 314 | 66 | 56 |
| VOYHTmiR-116.016 | D-3546 | 339 | 45 | 45 |
| VOYHTmiR-116.218 | D-3508 | 280 | 80 | 65 |
| VOYHTmiR-127.016 | D-3546 | 340 | 30 | 26 |
| VOYHTmiR-127.214 | D-3504 | 275 | 102 | 80 |
| VOYHTmiR-127.218 | D-3507 | 281 | 35 | 33 |
| VOYHTmiR-127.372 | D-3530 | 316 | 45 | 42 |
| VOYHTmiR-127.425 | D-3534 | 322 | 50 | 51 |
| VOYHTmiR-127.907 | D-3526 | 310 | 42 | 42 |
| VOYHTmiR-127.257 | D-3518 | 298 | 38 | 39 |
| mCherry | N/A | — | 100 | 100 |

[0629] In the human astrocyte cell line U251 MG, VOYHTmiR-104.579, VOYHTmiR-109.579, VOYHTmiR-114.579, VOYHTmiR-127.894, VOYHTmiR-102.425, VOYHTmiR-102.257, VOYHTmiR-104.218, VOYHTmiR-104.425, VOYHTmiR-104.907, VOYHTmiR-104.257, VOYHTmiR-109.218, VOYHTmiR-109.425, VOYHTmiR-109.907, VOYHTmiR-114.016 and VOYHTmiR-114.372 cause about 30-40% silencing; VOYHTmiR-102.907, VOYHTmiR-104.016, VOYHTmiR-127.425 cause about 41-50% silencing; VOYHTmiR-127.579, VOYHTmiR-102.016, VOYHTmiR-109.016, VOYHTmiR-116.016, VOYHTmiR-127.372 and VOYHTmiR-127.907 cause about 51-60% silencing; and VOYHTmiR-127.016, VOYHTmiR-127.218 and VOYHTmiR-127.257 cause about 61-70% silencing of HTT mRNA 24 hours after infection at a MOI of 1E6 vg/cell.

[0630] In neuronally differentiated SH-SY5Y cells, VOYHTmiR-102.219.n, VOYHTmiR-104.894, VOYHTmiR-109.219.n, VOYHTmiR-116.219.n, VOYHTmiR-116.894, VOYHTmiR-116.579, VOYHTmiR-114.219, VOYHTmiR-102.257, VOYHTmiR-104.218, VOYHTmiR-104.907, VOYHTmiR-109.218, VOYHTmiR-109.907, VOYHTmiR-109.257, VOYHTmiR-116.218 cause about 30-40% silencing; VOYHTmiR-102.894, VOYHTmiR-102.579, VOYHTmiR-109.894, VOYHTmiR-109.579, VOYHTmiR-114.894, VOYHTmiR-104.425, VOYHTmiR-104.257, VOYHTmiR-109.016, VOYHTmiR-109.372, VOYHTmiR-109.425, VOYHTmiR-114.372, VOYHTmiR-127.425 cause about 41-50% silencing; VOYHTmiR-104.579, VOYHTmiR-114.579, VOYHTmiR-127.894, VOYHTmiR-127.579, VOYHTmiR-102.016, VOYHTmiR-104.016, VOYHTmiR-114.016, VOYHTmiR-116.016, VOYHTmiR-127.372, VOYHTmiR-127.907 cause about 51-60% silencing; and VOYHTmiR-127.016, VOYHTmiR-127.218 and VOYHTmiR-127.257 cause about 61-75% silencing of HTT mRNA 24 hours after infection at a MOI of 1E6 vg/cell.

C. HTT Suppression at 36 Hours after Infection with MOI of 1E5 vg/Cell

[0631] 36 hours after infection, the relative expression of HTT mRNA was determined by qRT-PCR for the human astrocyte cell line U251 MG, and neuronally differentiated SH-SY5Y cells at a MOI of 1E5 vg/cell. Relative HTT mRNA expression was determined by normalization of HTT mRNA to a housekeeping mRNA, and further normalization to the mCherry-treated cells; the results are shown in Table 21.

TABLE 21
HTT mRNA Suppression in U251MG Cells and Neuronally Differentiated
SH-SY5Y Cells at MOI 1E5 vg/cell - 36 hours after infection

| | | | Relative HTT mRNA | |
|---|---|---|---|---|
| | | | Level (%) (normalized | |
| | Duplex | Expression | to XPNPEP1) | |
| Name | ID | Cassette | U251MG | SH-SY5Y |
| VOYHTmiR-104.579.5 | D-3569 | 367 | 75 | 70 |
| VOYHTmiR-104.579.2 | D-3566 | 348 | 70 | 88 |
| VOYHTmiR-104.579.1 | D-3566 | 347 | 45 | 53 |
| VOYHTmiR-104.579.9 | D-3566 | 354 | 40 | 60 |
| VOYHTmiR-104.579 | D-3549 | 342 | 37 | 50 |
| VOYHTmiR-104.579.7 | D-3567 | 352 | 35 | 44 |
| VOYHTmiR-104.579.3 | D-3566 | 349 | 25 | 35 |
| VOYHTmiR-104.579.10 | D-3570 | 368 | 25 | 38 |
| mCherry | N/A | — | 100 | 100 |

[0632] In the human astrocyte cell line U251 MG, VOYHTmiR-104.579.2 causes about 30-40% silencing; VOYHTmiR-104.579.1 and VOYHTmiR-104.579.9 cause about 51-60% silencing; VOYHTmiR-104.579, and VOYHTmiR-104.579.7 cause about 61-70% silencing; and VOYHTmiR-104.579.3, and VOYHTmiR-104.579.10 cause about 71-80% silencing of Htt mRNA 36 hours after infection at a MOI of 1E5 vg/cell.

[0633] In neuronally differentiated SH-SY5Y, VOYHTmiR-104.579.5 and VOYHTmiR-104.579.9 cause about 30-40% silencing; VOYHTmiR-104.579.1 and VOYHTmiR-104.579 cause about 41-50% silencing; and VOYHTmiR-104.579.7, VOYHTmiR-104.579.3 and VOYHTmiR-104.579.10 cause about 51-65% silencing of Htt mRNA 36 hours after infection at a MOI of 1E5 vg/cell.

D. HTT Suppression at 36 Hours after Infection with MOI of 1E6 vg/Cell

[0634] 36 hours after infection, the relative expression of HTT mRNA was determined by qRT-PCR in neuronally differentiated SH-SY5Y cells at a MOI of 1E6 vg/cell. Relative HTT mRNA expression was determined by normalization of HTT mRNA to a housekeeping mRNA, and further normalization to the mCherry-treated cells; the results are shown in Table 22.

TABLE 22
HTT mRNA Suppression in Neuronally Differentiated SH-SY5Y Cells
with MOI 1E6 - 36 hours after infection

| | | | Relative HTT mRNA |
|---|---|---|---|
| | | | Level (%) |
| | Duplex | Expression | (normalized to |
| Name | ID | Cassette | XPNPEP1) SH-SY5Y |
| VOYHTmiR-104.579.5 | D-3569 | 367 | 73 |
| VOYHTmiR-104.579.2 | D-3566 | 348 | 68 |
| VOYHTmiR-104.579.1 | D-3566 | 347 | 58 |
| VOYHTmiR-104.579.9 | D-3566 | 354 | 61 |
| VOYHTmiR-104.579 | D-3549 | 342 | 62 |
| VOYHTmiR-104.579.7 | D-3567 | 352 | 43 |
| VOYHTmiR-104.579.3 | D-3566 | 349 | 38 |
| VOYHTmiR-104.579.10 | D-3570 | 368 | 38 |
| mCherry | N/A | — | 100 |

[0635] In neuronally differentiated SH-SY5Y cells, VOYHTmiR-104.579.5, VOYHTmiR-104.579.2, VOYHTmiR-104.579.9, VOYHTmiR-104.579 cause about 30-40% silencing; VOYHTmiR-104.579.1 cause about 41-50% silencing; and VOYHTmiR-104.579.7, VOYHTmiR-104.579.3, and VOYHTmiR-104.579.10 cause about 51-65% silencing of Htt mRNA 36 hours after infection at a MOI of 1E6/cell.

E. HTT Suppression at 40 Hours after Infection-MOI of 1E6

[0636] 40 hours after infection, the relative expression of HTT mRNA was determined by qRT-PCR in the human astrocyte cell line U251 MG, and neuronally differentiated SH-SY5Y cells at a MOI of 1E6 vg/cell. Relative HTT mRNA expression was determined by normalization of HTT mRNA to a housekeeping mRNA, and further normalization to the mCherry-treated cells; the results are shown in Table 23.

TABLE 23
HTT mRNA Suppression in U251MG Cells and Neuronally Differentiated
SH-SY5Y Cells 40 hours after infection with a MOI of 1E6 vg/cell

| | | | Relative HTT mRNA | |
|---|---|---|---|---|
| | | | Level (%) (normalized | |
| | Duplex | Expression | to XPNPEP1) | |
| Name | ID | Cassette | U251MG | SH-SY5Y |
| VOYHTmiR-102.219.n | D-3513 | 288 | 111 | 84 |
| VOYHTmiR-102.894 | D-3520 | 299 | 94 | 79 |
| VOYHTmiR-102.579 | D-3548 | 341 | 97 | 78 |
| VOYHTmiR-104.219.n | D-3514 | 289 | 98 | 85 |
| VOYHTmiR-104.894 | D-3521 | 300 | 97 | 78 |
| VOYHTmiR-104.579 | D-3549 | 342 | 78 | 64 |
| VOYHTmiR-109.219.n | D-3513 | 290 | 106 | 88 |
| VOYHTmiR-109.894 | D-3520 | 301 | 90 | 74 |
| VOYHTmiR-109.579 | D-3548 | 343 | 87 | 69 |
| VOYHTmiR-116.219.n | D-3515 | 291 | 94 | 85 |
| VOYHTmiR-116.894 | D-3523 | 303 | 97 | 84 |
| VOYHTmiR-116.579 | D-3551 | 345 | 95 | 76 |
| VOYHTmiR-114.219 | D-3511 | 285 | 97 | 76 |
| VOYHTmiR-114.894 | D-3522 | 302 | 92 | 74 |
| VOYHTmiR-114.579 | D-3550 | 344 | 83 | 71 |
| VOYHTmiR-127.219.n | D-3513 | 292 | 105 | 85 |
| VOYHTmiR-127.894 | D-3520 | 304 | 85 | 67 |
| VOYHTmiR-127.579 | D-3548 | 346 | 74 | 59 |
| VOYHTmiR-102.214 | D-3500 | 270 | 66 | 70 |
| VOYHTmiR-102.016 | D-3544 | 335 | 94 | 96 |
| VOYHTmiR-102.218 | D-3505 | 276 | 95 | 90 |
| VOYHTmiR-102.372 | D-3528 | 311 | 91 | 91 |
| VOYHTmiR-102.425 | D-3532 | 317 | 86 | 91 |
| VOYHTmiR-102.907 | D-3524 | 305 | 87 | 94 |
| VOYHTmiR-102.257 | D-3516 | 293 | 92 | 88 |
| VOYHTmiR-104.016 | D-3545 | 336 | 71 | 66 |
| VOYHTmiR-104.218 | D-3506 | 277 | 85 | 81 |
| VOYHTmiR-104.372 | D-3529 | 312 | 95 | 93 |
| VOYHTmiR-104.425 | D-3533 | 318 | 80 | 78 |
| VOYHTmiR-104.907 | D-3525 | 306 | 77 | 71 |
| VOYHTmiR-104.257 | D-3517 | 294 | 76 | 69 |
| VOYHTmiR-109.016 | D-3546 | 337 | 76 | 75 |
| VOYHTmiR-109.218 | D-3507 | 278 | 88 | 74 |
| VOYHTmiR-109.372 | D-3530 | 313 | 89 | 76 |
| VOYHTmiR-109.425 | D-3534 | 319 | 84 | 77 |
| VOYHTmiR-109.907 | D-3526 | 307 | 84 | 83 |
| VOYHTmiR-109.257 | D-3518 | 295 | 92 | 75 |
| VOYHTmiR-114.016 | D-3547 | 338 | 72 | 60 |
| VOYHTmiR-114.214 | D-3501 | 273 | 93 | 88 |
| VOYHTmiR-114.372 | D-3531 | 314 | 90 | 81 |
| VOYHTmiR-116.016 | D-3546 | 339 | 75 | 66 |
| VOYHTmiR-116.218 | D-3508 | 280 | 91 | 76 |
| VOYHTmiR-127.016 | D-3546 | 340 | 55 | 48 |
| VOYHTmiR-127.214 | D-3504 | 275 | 99 | 86 |
| VOYHTmiR-127.218 | D-3507 | 281 | 59 | 60 |
| VOYHTmiR-127.372 | D-3530 | 316 | 63 | 62 |
| VOYHTmiR-127.425 | D-3534 | 322 | 71 | 66 |
| VOYHTmiR-127.907 | D-3526 | 310 | 74 | 70 |
| VOYHTmiR-127.257 | D-3518 | 298 | 62 | 63 |
| mCherry | N/A | — | 102 | 102 |

[0637] In the human astrocyte cell line U251 MG, VOYHTmiR-102.214, VOYHTmiR-104.016, VOYHTmiR-114.016, VOYHTmiR-127.372, VOYHTmiR-127.425 and VOYHTmiR-127.257 caused about 30-40% silencing; and VOYHTmiR-127.016 and VOYHTmiR-127.218 caused about 41-50% silencing of HTT mRNA 40 hours after infection at a MOI of 1E6 vg/cell.

[0638] In neuronally differentiated SH-SY5Y cells, VOYHTmiR-104.579, VOYHTmiR-109.579, VOYHTmiR-114.579, VOYHTmiR-127.894, VOYHTmiR-102.214, VOYHTmiR-104.016, VOYHTmiR-104.907, VOYHTmiR-104.257, VOYHTmiR-114.016, VOYHTmiR-116.016, VOYHTmiR-127.218, VOYHTmiR-127.372, VOYHTmiR-127.425, VOYHTmiR-127.907 and VOYHTmiR-127.257 caused about 30-40% silencing; VOYHTmiR-127.579 caused about 41-50% silencing; and VOYHTmiR-127.016 caused about 51-60% silencing of HTT mRNA 40 hours after infection at a MOI of 1E6 vg/cell.

### Example 3. In Vivo YAC128 Mouse Study of HTT Suppression, Guide to Passenger Ratio and Precision of 5′ End Processing after Treatment with AAV-miRNA Vectors Produced in Mammalian Cells

[0639] Based on in vitro suppression of HTT with plasmid transfection and with infection of AAV packaged AAV-miRNA expression vectors, selected AAV-miRNA expression vectors were packaged in AAV1 and evaluated in vivo in YAC128 mice, to quantify HTT mRNA suppression, and to assess guide to passenger ratio and the precision of 5′ end processing by deep sequencing. The AAV-miRNA transgene genomes were packaged in AAV1 with a CBA promoter (AAV1.CBA.iHtt), and then the vectors were produced by triple transfection in HEK293 or HEK293T cells, purified and formulated in phosphate buffered saline (PBS) with 0.001% F-68. Vectors were administered to YAC128 mice 7-12 weeks of age via bilateral intrastriatal infusion at a dose of approximately 1E10 to 3E10 vg in 5 uL over 10 minutes per hemisphere. A control group was treated with vehicle (PBS with 0.001% F-68). Each group comprised 4 females and 4 males. Approximately 28 days following test article administration, striatum tissue punches were collected and snap-frozen for later analysis.

[0640] Striatum tissue samples were then homogenized and total RNAs were purified. The relative expression of HTT was determined by qRT-PCR. Housekeeping genes for normalization included mouse XPNPEP1 (X-Prolyl Aminopeptidase 1) and mouse HPRT (hypoxanthine-guanine phosphoribosyltransferase). HTT mRNA was normalized to housekeeping gene expression, and then further normalized to the vehicle group. The results are shown in Tables 24 and 25.

TABLE 24
HTT mRNA Suppression in YAC128 Mouse Striatum after Intrastriatal Infusion

| | | | Relative HTT | |
|---|---|---|---|---|
| | | | mRNA Level (%) | Relative HTT |
| | | | (normalized to | mRNA Level (%) |
| | | | XPNPEP1) - mean ± | (normalized to |
| | Duplex | Expression | standard | HPRT) - mean ± |
| Name | ID | Cassette | deviation | standard deviation |
| VOYHTmiR-127.016 | D-3546 | 340 | 63 ± 8 | 68 ± 9 |
| VOYHTmiR-127.218 | D-3507 | 281 | 85 ± 19 | 86 ± 22 |
| VOYHTmiR-127.257 | D-3518 | 298 | 76 ± 13 | 78 ± 8 |
| VOYHTmiR-116.016 | D-3546 | 339 | 99 ± 11 | 106 ± 18 |
| VOYHTmiR-127.579 | D-3548 | 346 | 74 ± 6 | 77 ± 10 |
| VOYHTmiR-104.425 | D-3533 | 318 | 83 ± 4 | 86 ± 7 |
| VOYHTmiR-104.257 | D-3517 | 294 | 91 ± 7 | 96 ± 10 |
| VOYHTmiR-104.907 | D-3525 | 306 | 103 ± 18 | 102 ± 14 |
| Vehicle | N/A | — | 100 ± 15 | 100 ± 14 |

TABLE 25
HTT mRNA Suppression in YAC128 Mouse Striatum after Intrastriatal Infusion

| | | | Relative HTT | |
|---|---|---|---|---|
| | | | mRNA Level (%) | Relative HTT |
| | | | (normalized to | mRNA Level (%) |
| | | | XPNPEP1) - mean ± | (normalized to |
| | Duplex | Expression | standard | HPRT) - mean ± |
| Name | ID | Cassette | deviation | standard deviation |
| VOYHTmiR-104.579.3 | D-3566 | 349 | 67 + 19 | 63 ± 18 |
| VOYHTmiR-104.579.10 | D-3570 | 368 | 70 + 10 | 69 ± 10 |
| VOYHTmiR-102.016 | D-3544 | 335 | 92 + 12 | 91 ± 12 |
| VOYHTmiR-104.016 | D-3545 | 336 | 73 + 10 | 68 ± 7 |
| VOYHTmiR-114.016 | D-3547 | 338 | 93 + 9 | 88 ± 16 |
| VOYHTmiR-127.907 | D-3526 | 310 | 87 + 14 | 83 ± 10 |
| VOYHTmiR-109.016 | D-3546 | 337 | 79 + 7 | 76 ± 6 |
| VOYHTmiR-104.579 | D-3549 | 342 | 94 + 16 | 96 ± 13 |
| Vehicle | N/A | — | 100 ± 6 | 100 ± 8 |

[0641] In YAC128 mouse striatum, VOYHTmiR-127.016, VOYHTmiR-127.257, VOYHTmiR-127.579, VOYHTmiR-104.579.3, VOYHTmiR-104.579.10, VOYHTmiR-104.016 and VOYHTmiR-109.016 caused about 20-40% silencing of HTT mRNA at about 28 days after intrastriatal infusion of 1E10 to 3E10 vg per striatum.

[0642] Striatum tissue samples were also evaluated for pri-miRNA processing by deep sequencing to assess guide: passenger ratio, abundance of guide and passenger strands relative to the total endogenous pool of miRNAs, and precision of processing at the 5′-end of the guide strand. The results are shown in Table 26.

TABLE 26
Deep Sequencing of YAC128 Mouse Striatal Samples after Intrastriatal Infusion

| | | | Abundance | | |
|---|---|---|---|---|---|
| | | | Relative to | Guide/ | |
| | | Expression | Endogenous | Passenger | % N |
| Name | Duplex ID | Cassette | miRNA Pool (%) | Ratio | (Guide) |
| VOYHTmiR-127.016 | D-3546 | 340 | 58.13 | 422.9 | 91.5 |
| VOYHTmiR-127.218 | D-3507 | 281 | 1.49 | 2.44 | 96.2 |
| VOYHTmiR-127.257 | D-3518 | 298 | 9.66 | 0.04 | 85.7 |
| VOYHTmiR-116.016 | D-3546 | 339 | 3.09 | 207.8 | 95.9 |
| VOYHTmiR-127.579 | D-3548 | 346 | 0.05 | 24.28 | 83.2 |
| VOYHTmiR-104.425 | D-3533 | 318 | 0.12 | 0.32 | 92.7 |
| VOYHTmiR-104.257 | D-3517 | 294 | 0.07 | 0.38 | 97.1 |
| VOYHTmiR-104.907 | D-3525 | 306 | 6.45 | 2384 | 96.4 |
| VOYHTmiR-104.579.3 | D-3566 | 349 | 0.21 | 40 | 86.8 |
| VOYHTmiR-104.579.10 | D-3570 | 368 | 0.76 | 83 | 89.8 |
| VOYHTmiR-102.016 | D-3544 | 335 | 3.06 | 494 | 86.4 |
| VOYHTmiR-104.016 | D-3545 | 336 | 5.41 | 629 | 86.8 |
| VOYHTmiR-114.016 | D-3547 | 338 | 1.7 | 256 | 85.8 |
| VOYHTmiR-127.907 | D-3526 | 310 | 51.29 | 163 | 82.9 |
| VOYHTmiR-109.016 | D-3546 | 337 | 1.75 | 135 | 87.1 |
| VOYHTmiR-104.579 | D-3549 | 342 | 0.01 | 19 | 84.9 |

### Example 4. HTT Sequences

[0643] HTT derived oligonucleotides are synthesized and formed into duplexes as described in Table 3. The siRNA duplexes are then tested for in vitro inhibitory activity on endogenous HTT gene expression.

### Example 5. In Vitro Evaluation of AAV-miRNA Expression Vectors Containing Guide Strands Targeting HTT and Passenger Strands

[0644] Based on predicted selectivity of the antisense strand for human HTT genes, some of the guide and passenger strands of duplexes of the HTT siRNA listed in Table 3 are engineered into AAV-miRNA expression vectors and transfected into cells of the central nervous system, neuronal cell lines or non-neuronal cell lines. Even though overhang utilized in the siRNA knockdown study is a canonical dTdT for siRNA, the overhang in the constructs may comprise any dinucleotide overhang.

[0645] The cells used may be primary cells, cell lines, or cells derived from induced pluripotent stem cells (iPS cells).

[0646] HTT knockdown is then measured and deep sequencing performed to quantify the exact passenger and guide strands processed from each construct administered in the expression vector.

[0647] A guide to passenger strand ratio is calculated.

[0648] The 5′-terminus of the guide strand is sequenced to determine the precision of cleavage and to determine the percent expected guide strand resulting from precise cleavage.

[0649] AAV-miRNA expression vectors were packaged in AAV2, and then used to infect cells of the central nervous system, neuronal cell lines or non-neuronal cell lines to analyze in vitro knockdown of HTT. A mCherry construct or vehicle group is used as a negative control. Deep sequencing is again performed.

### Example 6. Pri-miRNA Cassettes Containing Guide Sequences Targeting HTT and Passenger Sequences

[0650] According to the present invention, constructs comprising the pri-miRNA cassette and HTT siRNAs were designed and are given in Table 27. The passenger and guide strands are described in the tables as well as the 5′ and 3′ Flanking Regions and the Loop region (also referred to as the linker region). In Table 27, the “miR” component of the name of the sequence does not necessarily correspond to the sequence numbering of miRNA genes (e.g., VOYHTmiR-102 is the name of the sequence and does not necessarily mean that miR-102 is part of the sequence).

TABLE 27
Pri-miRNA Cassettes Containing Passenger and Guide Sequences (5′-3′)

| | 5′ Flanking | | | Loop | | |
|---|---|---|---|---|---|---|
| | to 3′ Flanking | 5′ Flanking | Passenger | (Linker) | Guide | 3′ Flanking |
| Name | SEQ ID NO | SEQ ID NO | SEQ ID NO | SEQ ID NO | SEQ ID NO | SEQ ID NO |
| VOYHTmiR-102.016 | 335 | 251 | 119 | 257 | 9 | 266 |
| VOYHTmiR-102.214 | 270 | 251 | 120 | 257 | 11 | 266 |
| VOYHTmiR-102.218 | 276 | 251 | 121 | 257 | 13 | 266 |
| VOYHTmiR-102.219.n | 288 | 251 | 116 | 257 | 3 | 266 |
| VOYHTmiR-102.257 | 293 | 251 | 122 | 257 | 15 | 266 |
| VOYHTmiR-102.372 | 311 | 251 | 123 | 257 | 17 | 266 |
| VOYHTmiR-102.425 | 317 | 251 | 124 | 257 | 19 | 266 |
| VOYHTmiR-102.579 | 341 | 251 | 105 | 257 | 7 | 266 |
| VOYHTmiR-102.894 | 299 | 251 | 104 | 257 | 5 | 266 |
| VOYHTmiR-102.907 | 305 | 251 | 125 | 257 | 21 | 266 |
| VOYHTmiR-104.016 | 336 | 251 | 126 | 257 | 9 | 266 |
| VOYHTmiR-104.214 | 271 | 251 | 127 | 257 | 11 | 266 |
| VOYHTmiR-104.218 | 277 | 251 | 128 | 257 | 13 | 266 |
| VOYHTmiR-104.219.n | 289 | 251 | 117 | 257 | 3 | 266 |
| VOYHTmiR-104.257 | 294 | 251 | 129 | 257 | 15 | 266 |
| VOYHTmiR-104.372 | 312 | 251 | 130 | 257 | 17 | 266 |
| VOYHTmiR-104.425 | 318 | 251 | 131 | 257 | 19 | 266 |
| VOYHTmiR-104.579 | 342 | 251 | 108 | 257 | 7 | 266 |
| VOYHTmiR-104.579.1 | 347 | 250 | 168 | 260 | 7 | 265 |
| VOYHTmiR-104.579.10 | 368 | 256 | 171 | 264 | 7 | 269 |
| VOYHTmiR-104.579.2 | 348 | 252 | 168 | 260 | 7 | 265 |
| VOYHTmiR-104.579.3 | 349 | 252 | 168 | 261 | 7 | 265 |
| VOYHTmiR-104.579.4 | 350 | 253 | 168 | 260 | 7 | 268 |
| VOYHTmiR-104.579.5 | 367 | 252 | 170 | 263 | 30 | 265 |
| VOYHTmiR-104.579.6 | 351 | 254 | 168 | 260 | 7 | 268 |
| VOYHTmiR-104.579.7 | 352 | 255 | 168 | 260 | 29 | 265 |
| VOYHTmiR-104.579.8 | 353 | 252 | 169 | 262 | 7 | 265 |
| VOYHTmiR-104.579.9 | 354 | 256 | 168 | 260 | 7 | 269 |
| VOYHTmiR-104.894 | 300 | 251 | 107 | 257 | 5 | 266 |
| VOYHTmiR-104.907 | 306 | 251 | 132 | 257 | 21 | 266 |
| VOYHTmiR-109.016 | 337 | 251 | 133 | 258 | 9 | 266 |
| VOYHTmiR-109.214 | 272 | 251 | 135 | 258 | 11 | 266 |
| VOYHTmiR-109.218 | 278 | 251 | 137 | 258 | 13 | 266 |
| VOYHTmiR-109.219.n | 290 | 251 | 116 | 258 | 3 | 266 |
| VOYHTmiR-109.257 | 295 | 251 | 138 | 258 | 15 | 266 |
| VOYHTmiR-109.372 | 313 | 251 | 139 | 258 | 17 | 266 |
| VOYHTmiR-109.425 | 319 | 251 | 140 | 258 | 19 | 266 |
| VOYHTmiR-109.579 | 343 | 251 | 105 | 258 | 7 | 266 |
| VOYHTmiR-109.894 | 301 | 251 | 104 | 258 | 5 | 266 |
| VOYHTmiR-109.907 | 307 | 251 | 142 | 258 | 21 | 266 |
| VOYHTmiR-114.016 | 338 | 251 | 144 | 257 | 9 | 267 |
| VOYHTmiR-114.214 | 273 | 251 | 145 | 257 | 11 | 267 |
| VOYHTmiR-114.218 | 279 | 251 | 146 | 257 | 13 | 267 |
| VOYHTmiR-114.219 | 285 | 251 | 109 | 257 | 3 | 267 |
| VOYHTmiR-114.257 | 296 | 251 | 147 | 257 | 15 | 267 |
| VOYHTmiR-114.372 | 314 | 251 | 148 | 257 | 17 | 267 |
| VOYHTmiR-114.425 | 320 | 251 | 149 | 257 | 19 | 267 |
| VOYHTmiR-114.579 | 344 | 251 | 111 | 257 | 7 | 267 |
| VOYHTmiR-114.894 | 302 | 251 | 110 | 257 | 5 | 267 |
| VOYHTmiR-114.907 | 308 | 251 | 150 | 257 | 21 | 267 |
| VOYHTmiR-116.016 | 339 | 251 | 133 | 257 | 9 | 267 |
| VOYHTmiR-116.214 | 274 | 251 | 135 | 257 | 11 | 267 |
| VOYHTmiR-116.218 | 280 | 251 | 137 | 257 | 13 | 267 |
| VOYHTmiR-116.219.n | 291 | 251 | 118 | 257 | 3 | 267 |
| VOYHTmiR-116.257 | 297 | 251 | 138 | 257 | 15 | 267 |
| VOYHTmiR-116.372 | 315 | 251 | 139 | 257 | 17 | 267 |
| VOYHTmiR-116.425 | 321 | 251 | 140 | 257 | 19 | 267 |
| VOYHTmiR-116.579 | 345 | 251 | 114 | 257 | 7 | 267 |
| VOYHTmiR-116.894 | 303 | 251 | 113 | 257 | 5 | 267 |
| VOYHTmiR-116.907 | 309 | 251 | 142 | 257 | 21 | 267 |
| VOYHTmiR-127.016 | 340 | 252 | 133 | 261 | 9 | 268 |
| VOYHTmiR-127.214 | 275 | 252 | 135 | 261 | 5 | 268 |
| VOYHTmiR-127.218 | 281 | 252 | 137 | 261 | 13 | 268 |
| VOYHTmiR-127.219.n | 292 | 252 | 116 | 261 | 3 | 268 |
| VOYHTmiR-127.257 | 298 | 252 | 138 | 261 | 15 | 268 |
| VOYHTmiR-127.372 | 316 | 252 | 139 | 261 | 17 | 268 |
| VOYHTmiR-127.425 | 322 | 252 | 140 | 261 | 19 | 268 |
| VOYHTmiR-127.579 | 346 | 252 | 105 | 261 | 7 | 268 |
| VOYHTmiR-127.894 | 304 | 252 | 104 | 261 | 5 | 268 |
| VOYHTmiR-127.907 | 310 | 252 | 142 | 261 | 21 | 268 |

### Example 7. AAV-miRNA Expression Vectors

[0651] The constructs comprising the pri-miRNA cassettes containing guide strands targeting HTT and passenger strands were engineered into AAV-miRNA expression vectors (either ss or sc). The AAV-miRNA expression vector construct from ITR to ITR, recited 5′ to 3′, comprises a mutant or wild type ITR, a promoter (either a CMV (which includes an SV40 intron), U6, H1, CBA (which includes a CMVie enhancer, a CB promoter and an SV40 intron), the pri-miRNA cassette containing guide sequence targeting HTT and passenger sequence (from Table 3), a rabbit globin polyA and wild type ITR. In vitro and in vivo studies are performed to evaluate the pharmacological activity of the AAV-miRNA expression vectors.

### Example 8. In Vivo Studies of AAV-miRNA Expression Vectors

### A. In Vivo Studies of Efficacy

[0652] Based on HTT suppression in YAC128 mice, guide to passenger ratio, and precision of 5′ end processing, selected AAV-miRNA expression vectors are packaged in AAV1 (either as ss or sc) with a CBA promoter (AAV1.CBA.iHtt), formulated in phosphate buffered saline (PBS) with 0.001% F-68 and administered to YAC128 mice to assess efficacy. AAV1 vectors are administered to YAC128 mice 7-12 weeks of age via bilateral intrastriatal infusion at a dose of approximately 1E10 to 3E10 vg in 5 uL over 10 minutes per hemisphere. A control group is treated with vehicle (PBS with 0.001% F-68). Following test article administration, behavioral tests including rotarod and Porsolt swim tests are performed at pre-determined time intervals, to assess efficacy. At a pre-determined day post-dosing, animals are euthanized, and striatum tissue punches are collected and snap-frozen. Tissue samples are homogenized and the total RNA is purified. The relative expression of HTT is determined by qRT-PCR. Housekeeping genes for normalization included mouse XPNPEP1. HTT is normalized to housekeeping gene expression, and then further normalized to the vehicle group. Samples are also used to quantify HTT protein.

### B. In Vivo Study in NHP of HTT Suppression, Guide to Passenger Ratio and 5′ End Precision of Processing

[0653] Based on HTT suppression in YAC128 mice, guide to passenger ratio, and precision of 5′ end processing, selected AAV-miRNA expression vectors are packaged in AAV1 with a CBA promoter (AAV1.CBA.iHtt), formulated in phosphate buffered saline (PBS) with 0.001% F-68 and administered to non-human primates by intraparenchymal brain infusion. A control group is treated with vehicle (PBS with 0.001% F-68). The relative expression of HTT mRNA, guide to passenger ratio, and the precision of 5′ end processing is determined in various tissue samples at a pre-determined time post-dosing.

[0654] While the present invention has been described at some length and with some particularity with respect to the several described embodiments, it is not intended that it should be limited to any such particulars or embodiments or any particular embodiment, but it is to be construed with references to the appended claims so as to provide the broadest possible interpretation of such claims in view of the prior art and, therefore, to effectively encompass the intended scope of the invention.

[0655] All publications, patent applications, patents, and other references mentioned herein are incorporated by reference in their entirety. In case of conflict, the present specification, including definitions, will control. In addition, section headings, the materials, methods, and examples are illustrative only and not intended to be limiting.

1.-128. (canceled)

129. An adeno-associated viral (AAV) vector genome comprising a nucleic acid sequence positioned between two inverted terminal repeats (ITRs), wherein the nucleic acid sequence encodes a sense strand sequence and an antisense strand sequence, wherein the sense strand sequence comprises at least 19 consecutive nucleotides from a sense strand sequence selected from any one of SEQ ID NOs: 168, 103-167, and 169-249; wherein the antisense strand sequence comprises at least 19 consecutive nucleotides from an antisense strand sequence selected from any one of SEQ ID NOs: 7, 3-6, and 8-102; and wherein said sense strand sequence and antisense strand sequence comprise a region of complementarity of at least 17 nucleotides in length.

130. The AAV vector genome of claim 129, wherein:
(i) the sense strand sequence and the antisense strand sequence are each at least 20, 21, 22, or 23 nucleotides in length;
(ii) the sense strand sequence and/or the antisense strand sequence comprises a 3′ overhang of at least 1 or 2 nucleotides; and/or
(iii) the antisense strand sequence comprises at least one mismatch relative to a target mRNA sequence.

131. The AAV vector genome of claim 129, which further comprises:
(i) a promoter operably linked to the nucleic acid sequence encoding the sense strand sequence and the antisense strand sequence;
(ii) an enhancer;
(iii) an intron region; and/or
(iii) a poly A signal region.

132. The AAV vector genome of claim 131, wherein:
(i) the promoter comprises a CBA promoter, a CMV promoter, a PGK promoter, an H1 promoter, a UBC promoter, a GUSB promoter, an NSE promoter, a synapsin promoter, a MeCP2 promoter, or a GFAP promoter;
(ii) the enhancer comprises a CMV enhancer; and/or
(iii) the intron comprises an SV40 intron.

133. The AAV vector genome of claim 129, wherein the nucleotide sequence encodes a modulatory polynucleotide comprising the sense strand sequence and the antisense strand sequence, wherein the encoded modulatory polynucleotide comprises:
(i) a 5′ flanking region comprising the nucleotide sequence of any one of SEQ ID NOs: 252-256;
(ii) a loop region comprising the nucleotide sequence of any one of SEQ ID NOs: 261-264; and
(iii) a 3′ flanking region comprising the nucleotide sequence of any one of SEQ ID NOS: 265-269.

134. A recombinant AAV (rAAV) viral particle comprising the AAV vector genome of claim 129, and a capsid protein.

135. The rAAV viral particle of claim 134, wherein the capsid protein comprises an AAV1 capsid protein or variant thereof, an AAV5 capsid protein or variant thereof, or an AAV9 capsid protein or variant thereof.

136. A vector comprising the AAV vector genome of claim 129.

137. A cell comprising the AAV vector genome of claim 129, which is a mammalian cell, a medium spiny neuron, a cortical neuron, or an astrocyte.

138. A pharmaceutical composition comprising the rAAV viral particle of claim 134, and a pharmaceutically acceptable excipient.

139. A method of inhibiting a huntingtin (HTT) gene, mRNA, and/or protein expression in a cell, comprising contacting the cell with an AAV vector genome comprising a nucleic acid sequence positioned between two inverted terminal repeats (ITRs), wherein the nucleic acid sequence encodes a sense strand sequence and an antisense strand sequence, wherein the sense strand sequence comprises at least 19 consecutive nucleotides from a sense strand sequence selected from any one of SEQ ID NO: 168, 103-167, and 169-249; wherein the antisense strand sequence comprises at least 19 consecutive nucleotides from an antisense strand sequence selected from any one of SEQ ID NO: 7, 3-6, and 8-102; and wherein said sense strand sequence and antisense strand sequence comprise a region of complementarity of at least 17 nucleotides in length,
thereby inhibiting expression of the HTT gene, mRNA, and/or protein in the cell.

140. The method of claim 139, wherein the AAV vector genome is present in an rAAV viral particle, optionally wherein the rAAV viral particle further comprises a capsid protein, optionally wherein the capsid protein comprises an AAV1 capsid protein or variant thereof, an AAV5 capsid protein or variant thereof, or an AAV9 capsid protein or variant thereof.

141. The method of claim 140, wherein the cell:
(i) comprises a medium spiny neuron, a cortical neuron, or an astrocyte; and/or
(ii) is in a subject, wherein the subject has Huntington's disease (HD).

142. A method of treating Huntington's Disease (HD) in a subject, comprising administering to the subject an effective amount of the rAAV particle of claim 134, thereby treating HD in the subject.

143. The method of claim 142, wherein the expression of an HTT gene, mRNA, and/or protein is inhibited in a CNS cell or a CNS region, optionally wherein:
(i) the CNS cell comprises a neuron, a medium spiny neuron, an astrocyte, or a combination thereof;
(ii) the CNS region is a forebrain region, a midbrain region, a putamen region, a striatum region, a cortex region, a motor cortex region, a somatosensory cortex region, a temporal cortex region, or a combination thereof; or
(iii) the CNS region is a putamen region.

144. The method of claim 143, wherein the HTT gene comprises a wild-type HTT gene, mRNA, and/or protein; an HTT gene, mRNA, and/or protein comprising at least one mutation; an HTT gene comprising a CAG repeat; or a combination thereof.

145. The method of claim 144, wherein the HTT gene comprising a CAG repeat is a CAG-expanded HTT, comprising at least 36-40 CAG repeats.

146. The method of claim 142, wherein the HD is:
(i) a juvenile form HD, e.g., HD in a subject of 2 to 20 years of age;
(ii) an early stage HD;
(iii) a late stage HD;
(iv) a fully penetrant HD, e.g., wherein the HTT gene as least 41 or more CAG repeats;
(v) an incomplete penetrance HD, e.g., wherein the HTT gene has 36-40 CAG repeats; and/or
(vi) an asymptomatic HD.

147. The method of claim 142, wherein the AAV vector genome is administered:
(i) to the putamen and/or the thalamus;
(ii) via intraputamenal administration, intrathalamic administration, or both; and/or
(iii) via intraparenchymal injection.

148. The method of claim 142, wherein the AAV vector genome is administered to the subject in combination with an additional therapeutic agent suitable for treatment or prevention of HD, wherein the additional therapeutic agent comprises a neuroprotective agent, a dopamine-depleting agent (e.g., tetrabenazine), a benzodiazepine (e.g., clonazepam), an anticonvulsant (e.g., sodium valproate and/or levetiracetam), an amino acid precursor of dopamine (e.g., levodopa), a skeletal muscle relaxant (e.g., baclofen, tizanidine), an inhibitor for acetycholine release at the neuromuscular junction (e.g., botulinum toxin), an atypical neuroleptic (e.g., olanzapine, quetiapine, risperidone, sulpiride, haloperidol, clozapine, aripiprazole), an agent to increase ATP/cellular energeticsa (e.g., creatine), selective serotonin reuptake inhibitor (SSRIs) (e.g., citalopram, fluoxetine, paroxetine, sertraline, mirtazapine, venlafaxine), a hypnotic (e.g., xopiclone and/or zolpidem), a mood stabilizer (e.g., lithium), IGF-I, GDNF, BDNF, CTNF, VEGF, Colivelin, Xaliproden, Thyrotrophin-releasing hormone, ADNF, or a combination thereof.

149. A siRNA duplex for inhibiting expression of HTT, comprising a sense strand sequence and an antisense strand sequence, wherein the sense strand sequence comprises at least 19 consecutive nucleotides from any one of SEQ ID NOs: 168, 103-167, and 169-249, and the antisense strand sequence comprises at least 19 consecutive nucleotides from any one of SEQ ID NOs: 7, 3-6, and 8-102.

150. A method of making the rAAV particle of claim 134, comprising:
(i) providing a cell comprising the AAV vector genome and a nucleic acid encoding a capsid protein; and
(ii) purifying the rAAV viral particle from the cell;
thereby making the rAAV viral particle.

The application's sequence listing, which the Patent Office published only in electronic form, follows.

SEQUENCE LISTING (1283 sequences)

SEQ ID NO: 1 - protein, 3137 aa, Homo sapiens
MATLEKLMKAFESLKSFQQQQQQQQQQQQQQQQQQQQQQQPPPPPPPPPPPQLPQPPPQAQPLLPQPQPPPPPPPPPPGPAVAEEPLHRPKKELSATKKDRVNHCLTICENIVAQSVRNSPEFQKLLGIAMELFLLCSDDAESDVRMVADECLNKVIKALMDSNLPRLQLELYKEIKKNGAPRSLRAALWRFAELAHLVRPQKCRPYLVNLLPCLTRTSKRPEESVQETLAAAVPKIMASFGNFANDNEIKVLLKAFIANLKSSSPTIRRTAAGSAVSICQHSRRTQYFYSWLLNVLLGLLVPVEDEHSTLLILGVLLTLRYLVPLLQQQVKTSLKGSFGVTRKEMEVSPSAEQLVQVYELTLHHTQHQDHNVVTGALELLQQLFRTPPPELLQTLTAVGGIGQLTAAKEESGGRSRSGSIVELIAGGGSSCSPVLSRKQKGKVLLGEEEALEDDSESRSDVSSSALTASVKDEISGELAASSGVSTPGSAGHDIITEQPRSQHTLQADSVDLASCDLTSSATDGDEEDILSHSSSQVSAVPSDPAMDLNDGTQASSPISDSSQTTTEGPDSAVTPSDSSEIVLDGTDNQYLGLQIGQPQDEDEEATGILPDEASEAFRNSSMALQQAHLLKNMSHCRQPSDSSVDKFVLRDEATEPGDQENKPCRIKGDIGQSTDDDSAPLVHCVRLLSASFLLTGGKNVLVPDRDVRVSVKALALSCVGAAVALHPESFFSKLYKVPLTTEYPEEQYVSDILNYIDHGDPQVRGATAILCGTLICSILSRSRFHVGDWMGTIRTLTGNTFSLADCIPLLRKTLKDESSVTCKLACTAVRNCVMSLCSSSYSELGLQLIIDVLTLRNSSYWLVRTELLETLAEIDFRLVSFLEAKAENLHRGAHHYTGLLKLQERVLNNVVIHLLGDEDPRVRHVAAASLIRLVPKLFYKCDQGQADPVVAVARDQSSVYLKLLMHETQPPSHFSVSTITRIYRGYNLLPSITDVTMENNLSRVIAAVSHELITSTTRALTFGCCEALCLLSTAFPVCIWSLGWHCGVPPLSASDESRKSCTVGMATMILTLLSSAWFPLDLSAHQDALILAGNLLAASAPKSLRSSWASEEEANPAATKQEEVWPALGDRALVPMVEQLFSHLLKVINICAHVLDDVAPGPAIKAALPSLTNPPSLSPIRRKGKEKEPGEQASVPLSPKKGSEASAASRQSTSGPVTTSKSSSLGSFYHLPSYLKLHDVLKATHANYKVTLDLQNSTEKFGGFLRSALDVLSQILELATLQDIGKCVEEILGYLKSCFSREPMMATVCVQQLLKTLFGTNLASQFDGLSSNPSKSQGRAQRLGSSSVRPGLYHYCFMAPYTHFTQALADASLRNMVQAEQENTSGWFDVLQKVSTQLKTNLTSVTKNRADKNAIHNHIRLFEPLVIKALKQYTTTTCVQLQKQVLDLLAQLVQLRVNYCLLDSDQVFIGFVLKQFEYIEVGQFRESEAIIPNIFFFLVLLSYERYHSKQIIGIPKIIQLCDGIMASGRKAVTHAIPALQPIVHDLFVLRGTNKADAGKELETQKEVVVSMLLRLIQYHQVLEMFILVLQQCHKENEDKWKRLSRQIADIILPMLAKQQMHIDSHEALGVLNTLFEILAPSSLRPVDMLLRSMFVTPNTMASVSTVQLWISGILAILRVLISQSTEDIVLSRIQELSFSPYLISCTVINRLRDGDSTSTLEEHSEGKQIKNLPEETFSRFLLQLVGILLEDIVTKQLKVEMSEQQHTFYCQELGTLLMCLIHIFKSGMFRRITAAATRLFRSDGCGGSFYTLDSLNLRARSMITTHPALVLLWCQILLLVNHTDYRWWAEVQQTPKRHSLSSTKLLSPQMSGEEEDSDLAAKLGMCNREIVRRGALILFCDYVCQNLHDSEHLTWLIVNHIQDLISLSHEPPVQDFISAVHRNSAASGLFIQAIQSRCENLSTPTMLKKTLQCLEGIHLSQSGAVLTLYVDRLLCTPFRVLARMVDILACRRVEMLLAANLQSSMAQLPMEELNRIQEYLQSSGLAQRHQRLYSLLDRFRLSTMQDSLSPSPPVSSHPLDGDGHVSLETVSPDKDWYVHLVKSQCWTRSDSALLEGAELVNRIPAEDMNAFMMNSEFNLSLLAPCLSLGMSEISGGQKSALFEAAREVTLARVSGTVQQLPAVHHVFQPELPAEPAAYWSKLNDLFGDAALYQSLPTLARALAQYLVVVSKLPSHLHLPPEKEKDIVKFVVATLEALSWHLIHEQIPLSLDLQAGLDCCCLALQLPGLWSVVSSTEFVTHACSLIYCVHFILEAVAVQPGEQLLSPERRTNTPKAISEEEEEVDPNTQNPKYITAACEMVAEMVESLQSVLALGHKRNSGVPAFLTPLLRNIIISLARLPLVNSYTRVPPLVWKLGWSPKPGGDFGTAFPEIPVEFLQEKEVFKEFIYRINTLGWTSRTQFEETWATLLGVLVTQPLVMEQEESPPEETERTQINVLAVQAITSLVLSAMTVPVAGNPAVSCLEQQPRNKPLKALTRFGRKLSIIRGIVEQEIQAMVSKRENIATHHLYQAWDPVPSLSPATTGALISHEKLLLQINPERELGSMSYKLGQVSIHSVWLGNSITPLREEEWDEEEEEEADAPAPSSPPTSPVNSRKHRAGVDIHSCSQFLLELYSRWILPSSSARRTPAILISEVVRSLLVVSDLFTERNQFELMYVTLTELRRVHPSEDEILAQYLVPATCKAAAVLGMDKAVAEPVSRLLESTLRSSHLPSRVGALHGVLYVLECDLLDTAKQLIPVISDYLLSNLKGIAHCVNIHSQQHVLVMCATAFYLIENYPLDVGPEFSASIIQMCGVMLSGSEESTPSIIYHCALRGLERLLLSEQLSRLDAESLVKLSVDRVNVHSPHRAMAALGLMLTCMYTGKEKVSPGRTSDPNPAAPDSESVIVAMERVSVLFDRIRKGFPCEARVVARILPQFLDDFFPPQDIMNKVIGEFLSNQQPYPQFMATVVYKVFQTLHSTGQSSMVRDWVMLSLSNFTQRAPVAMATWSLSCFFVSASTSPWVAAILPHVISRMGKLEQVDVNLFCLVATDFYRHQIEEELDRRAFQSVLEVVAAPGSPYHRLLTCLRNVHKVTTC

SEQ ID NO: 2 - DNA, 13669 bp, Homo sapiens
  source 1..13669: mol_type = unassigned DNA
ttgctgtgtgaggcagaacctgcgggggcaggggcgggctggttccctggccagccattggcagagtccgcaggctagggctgtcaatcatgctggccggcgtggccccgcctccgccggcgcggccccgcctccgccggcgcagcgtctgggacgcaaggcgccgtgggggctgccgggacgggtccaagatggacggccgctcaggttctgcttttacctgcggcccagagccccattcattgccccggtgctgagcggcgccgcgagtcggcccgaggcctccggggactgccgtgccgggcgggagaccgccatggcgaccctggaaaagctgatgaaggccttcgagtccctcaagtccttccagcagcagcagcagcagcagcagcagcagcagcagcagcagcagcagcagcagcagcagcagcaacagccgccaccgccgccgccgccgccgccgcctcctcagcttcctcagccgccgccgcaggcacagccgctgctgcctcagccgcagccgcccccgccgccgcccccgccgccacccggcccggctgtggctgaggagccgctgcaccgaccaaagaaagaactttcagctaccaagaaagaccgtgtgaatcattgtctgacaatatgtgaaaacatagtggcacagtctgtcagaaattctccagaatttcagaaacttctgggcatcgctatggaactttttctgctgtgcagtgatgacgcagagtcagatgtcaggatggtggctgacgaatgcctcaacaaagttatcaaagctttgatggattctaatcttccaaggttacagctcgagctctataaggaaattaaaaagaatggtgcccctcggagtttgcgtgctgccctgtggaggtttgctgagctggctcacctggttcggcctcagaaatgcaggccttacctggtgaaccttctgccgtgcctgactcgaacaagcaagagacccgaagaatcagtccaggagaccttggctgcagctgttcccaaaattatggcttcttttggcaattttgcaaatgacaatgaaattaaggttttgttaaaggccttcatagcgaacctgaagtcaagctcccccaccattcggcggacagcggctggatcagcagtgagcatctgccagcactcaagaaggacacaatatttctatagttggctactaaatgtgctcttaggcttactcgttcctgtcgaggatgaacactccactctgctgattcttggcgtgctgctcaccctgaggtatttggtgcccttgctgcagcagcaggtcaaggacacaagcctgaaaggcagcttcggagtgacaaggaaagaaatggaagtctctccttctgcagagcagcttgtccaggtttatgaactgacgttacatcatacacagcaccaagaccacaatgttgtgaccggagccctggagctgttgcagcagctcttcagaacgcctccacccgagcttctgcaaaccctgaccgcagtcgggggcattgggcagctcaccgctgctaaggaggagtctggtggccgaagccgtagtgggagtattgtggaacttatagctggagggggttcctcatgcagccctgtcctttcaagaaaacaaaaaggcaaagtgctcttaggagaagaagaagccttggaggatgactctgaatcgagatcggatgtcagcagctctgccttaacagcctcagtgaaggatgagatcagtggagagctggctgcttcttcaggggtttccactccagggtcagcaggtcatgacatcatcacagaacagccacggtcacagcacacactgcaggcggactcagtggatctggccagctgtgacttgacaagctctgccactgatggggatgaggaggatatcttgagccacagctccagccaggtcagcgccgtcccatctgaccctgccatggacctgaatgatgggacccaggcctcgtcgcccatcagcgacagctcccagaccaccaccgaagggcctgattcagctgttaccccttcagacagttctgaaattgtgttagacggtaccgacaaccagtatttgggcctgcagattggacagccccaggatgaagatgaggaagccacaggtattcttcctgatgaagcctcggaggccttcaggaactcttccatggcccttcaacaggcacatttattgaaaaacatgagtcactgcaggcagccttctgacagcagtgttgataaatttgtgttgagagatgaagctactgaaccgggtgatcaagaaaacaagccttgccgcatcaaaggtgacattggacagtccactgatgatgactctgcacctcttgtccattgtgtccgccttttatctgcttcgtttttgctaacagggggaaaaaatgtgctggttccggacagggatgtgagggtcagcgtgaaggccctggccctcagctgtgtgggagcagctgtggccctccacccggaatctttcttcagcaaactctataaagttcctcttgacaccacggaataccctgaggaacagtatgtctcagacatcttgaactacatcgatcatggagacccacaggttcgaggagccactgccattctctgtgggaccctcatctgctccatcctcagcaggtcccgcttccacgtgggagattggatgggcaccattagaaccctcacaggaaatacattttctttggcggattgcattcctttgctgcggaaaacactgaaggatgagtcttctgttacttgcaagttagcttgtacagctgtgaggaactgtgtcatgagtctctgcagcagcagctacagtgagttaggactgcagctgatcatcgatgtgctgactctgaggaacagttcctattggctggtgaggacagagcttctggaaacccttgcagagattgacttcaggctggtgagctttttggaggcaaaagcagaaaacttacacagaggggctcatcattatacagggcttttaaaactgcaagaacgagtgctcaataatgttgtcatccatttgcttggagatgaagaccccagggtgcgacatgttgccgcagcatcactaattaggcttgtcccaaagctgttttataaatgtgaccaaggacaagctgatccagtagtggccgtggcaagagatcaaagcagtgtttacctgaaacttctcatgcatgagacgcagcctccatctcatttctccgtcagcacaataaccagaatatatagaggctataacctactaccaagcataacagacgtcactatggaaaataacctttcaagagttattgcagcagtttctcatgaactaatcacatcaaccaccagagcactcacatttggatgctgtgaagctttgtgtcttctttccactgccttcccagtttgcatttggagtttaggttggcactgtggagtgcctccactgagtgcctcagatgagtctaggaagagctgtaccgttgggatggccacaatgattctgaccctgctctcgtcagcttggttcccattggatctctcagcccatcaagatgctttgattttggccggaaacttgcttgcagccagtgctcccaaatctctgagaagttcatgggcctctgaagaagaagccaacccagcagccaccaagcaagaggaggtctggccagccctgggggaccgggccctggtgcccatggtggagcagctcttctctcacctgctgaaggtgattaacatttgtgcccacgtcctggatgacgtggctcctggacccgcaataaaggcagccttgccttctctaacaaaccccccttctctaagtcccatccgacgaaaggggaaggagaaagaaccaggagaacaagcatctgtaccgttgagtcccaagaaaggcagtgaggccagtgcagcttctagacaatctgatacctcaggtcctgttacaacaagtaaatcctcatcactggggagtttctatcatcttccttcatacctcaaactgcatgatgtcctgaaagctacacacgctaactacaaggtcacgctggatcttcagaacagcacggaaaagtttggagggtttctccgctcagccttggatgttctttctcagatactagagctggccacactgcaggacattgggaagtgtgttgaagagatcctaggatacctgaaatcctgctttagtcgagaaccaatgatggcaactgtttgtgttcaacaattgttgaagactctctttggcacaaacttggcctcccagtttgatggcttatcttccaaccccagcaagtcacaaggccgagcacagcgccttggctcctccagtgtgaggccaggcttgtaccactactgcttcatggccccgtacacccacttcacccaggccctcgctgacgccagcctgaggaacatggtgcaggcggagcaggagaacgacacctcgggatggtttgatgtcctccagaaagtgtctacccagttgaagacaaacctcacgagtgtcacaaagaaccgtgcagataagaatgctattcataatcacattcgtttgtttgaacctcttgttataaaagctttaaaacagtacacgactacaacatgtgtgcagttacagaagcaggttttagatttgctggcgcagctggttcagttacgggttaattactgtcttctggattcagatcaggtgtttattggctttgtattgaaacagtttgaatacattgaagtgggccagttcagggaatcagaggcaatcattccaaacatctttttcttcttggtattactatcttatgaacgctatcattcaaaacagatcattggaattcctaaaatcattcagctctgtgatggcatcatggccagtggaaggaaggctgtgacacatgccataccggctctgcagcccatagtccacgacctctttgtattaagaggaacaaataaagctgatgcaggaaaagagcttgaaacccaaaaagaggtggtggtgtcaatgttactgagactcatccagtaccatcaggtgttggagatgttcattcttgtcctgcagcagtgccacaaggagaatgaagacaagtggaagcgactgtctcgacagatagctgacatcatcctcccaatgttagccaaacagcagatgcacattgactctcatgaagcccttggagtgttaaatacattatttgagattttggccccttcctccctccgtccggtagacatgcttttacggagtatgttcgtcactccaaacacaatggcgtccgtgagcactgttcaactgtggatatcgggaattctggccattttgagggttctgatttcccagtcaactgaagatattgttctttctcgtattcaggagctctccttctctccgtatttaatctcctgtacagtaattaataggttaagagatggggacagtacttcaacgctagaagaacacagtgaagggaaacaaataaagaatttgccagaagaaacattttcaaggtttctattacaactggttggtattcttttagaagacattgttacaaaacagctgaaggtggaaatgagtgagcagcaacatactttctattgccaggaactaggcacactgctaatgtgtctgatccacatcttcaagtctggaatgttccggagaatcacagcagctgccactaggctgttccgcagtgatggctgtggcggcagtttctacaccctggacagcttgaacttgcgggctcgttccatgatcaccacccacccggccctggtgctgctctggtgtcagatactgctgcttgtcaaccacaccgactaccgctggtgggcagaagtgcagcagaccccgaaaagacacagtctgtccagcacaaagttacttagtccccagatgtctggagaagaggaggattctgacttggcagccaaacttggaatgtgcaatagagaaatagtacgaagaggggctctcattctcttctgtgattatgtctgtcagaacctccatgactccgagcacttaacgtggctcattgtaaatcacattcaagatctgatcagcctttcccacgagcctccagtacaggacttcatcagtgccgttcatcggaactctgctgccagcggcctgttcatccaggcaattcagtctcgttgtgaaaacctttcaactccaaccatgctgaagaaaactcttcagtgcttggaggggatccatctcagccagtcgggagctgtgctcacgctgtatgtggacaggcttctgtgcacccctttccgtgtgctggctcgcatggtcgacatccttgcttgtcgccgggtagaaatgcttctggctgcaaatttacagagcagcatggcccagttgccaatggaagaactcaacagaatccaggaataccttcagagcagcgggctcgctcagagacaccaaaggctctattccctgctggacaggtttcgtctctccaccatgcaagactcacttagtccctctcctccagtctcttcccacccgctggacggggatgggcacgtgtcactggaaacagtgagtccggacaaagactggtacgttcatcttgtcaaatcccagtgttggaccaggtcagattctgcactgctggaaggtgcagagctggtgaatcggattcctgctgaagatatgaatgccttcatgatgaactcggagttcaacctaagcctgctagctccatgcttaagcctagggatgagtgaaatttctggtggccagaagagtgccctttttgaagcagcccgtgaggtgactctggcccgtgtgagcggcaccgtgcagcagctccctgctgtccatcatgtcttccagcccgagctgcctgcagagccggcggcctactggagcaagttgaatgatctgtttggggatgctgcactgtatcagtccctgcccactctggcccgggccctggcacagtacctggtggtggtctccaaactgcccagtcatttgcaccttcctcctgagaaagagaaggacattgtgaaattcgtggtggcaacccttgaggccctgtcctggcatttgatccatgagcagatcccgctgagtctggatctccaggcagggctggactgctgctgcctggccctgcagctgcctggcctctggagcgtggtctcctccacagagtttgtgacccacgcctgctccctcatctactgtgtgcacttcatcctggaggccgttgcagtgcagcctggagagcagcttcttagtccagaaagaaggacaaataccccaaaagccatcagcgaggaggaggaggaagtagatccaaacacacagaatcctaagtatatcactgcagcctgtgagatggtggcagaaatggtggagtctctgcagtcggtgttggccttgggtcataaaaggaatagcggcgtgccggcgtttctcacgccattgctaaggaacatcatcatcagcctggcccgcctgccccttgtcaacagctacacacgtgtgcccccactggtgtggaagcttggatggtcacccaaaccgggaggggattttggcacagcattccctgagatccccgtggagttcctccaggaaaaggaagtctttaaggagttcatctaccgcatcaacacactaggctggaccagtcgtactcagtttgaagaaacttgggccaccctccttggtgtcctggtgacgcagcccctcgtgatggagcaggaggagagcccaccagaagaagacacagagaggacccagatcaacgtcctggccgtgcaggccatcacctcactggtgctcagtgcaatgactgtgcctgtggccggcaacccagctgtaagctgcttggagcagcagccccggaacaagcctctgaaagctctcgacaccaggtttgggaggaagctgagcattatcagagggattgtggagcaagagattcaagcaatggtttcaaagagagagaatattgccacccatcatttatatcaggcatgggatcctgtcccttctctgtctccggctactacaggtgccctcatcagccacgagaagctgctgctacagatcaaccccgagcgggagctggggagcatgagctacaaactcggccaggtgtccatacactccgtgtggctggggaacagcatcacacccctgagggaggaggaatgggacgaggaagaggaggaggaggccgacgcccctgcaccttcgtcaccacccacgtctccagtcaactccaggaaacaccgggctggagttgacatccactcctgttcgcagtttttgcttgagttgtacagccgctggatcctgccgtccagctcagccaggaggaccccggccatcctgatcagtgaggtggtcagatcccttctagtggtctcagacttgttcaccgagcgcaaccagtttgagctgatgtatgtgacgctgacagaactgcgaagggtgcacccttcagaagacgagatcctcgctcagtacctggtgcctgccacctgcaaggcagctgccgtccttgggatggacaaggccgtggcggagcctgtcagccgcctgctggagagcacgctcaggagcagccacctgcccagcagggttggagccctgcacggcgtcctctatgtgctggagtgcgacctgctggacgacactgccaagcagctcatcccggtcatcagcgactatctcctctccaacctgaaagggatcgcccactgcgtgaacattcacagccagcagcacgtactggtcatgtgtgccactgcgttttacctcattgagaactatcctctggacgtagggccggaattttcagcatcaataatacagatgtgtggggtgatgctgtctggaagtgaggagtccaccccctccatcatttaccactgtgccctcagaggcctggagcgcctcctgctctctgagcagctctcccgcctggatgcagaatcgctggtcaagctgagtgtggacagagtgaacgtgcacagcccgcaccgggccatggcggctctgggcctgatgctcacctgcatgtacacaggaaaggagaaagtcagtccgggtagaacttcagaccctaatcctgcagcccccgacagcgagtcagtgattgttgctatggagcgggtatctgttctttttgataggatcaggaaaggctttccttgtgaagccagagtggtggccaggatcctgccccagtttctagacgacttcttcccaccccaggacatcatgaacaaagtcatcggagagtttctgtccaaccagcagccatacccccagttcatggccaccgtggtgtataaggtgtttcagactctgcacagcaccgggcagtcgtccatggtccgggactgggtcatgctgtccctctccaacttcacgcagagggccccggtcgccatggccacgtggagcctctcctgcttctttgtcagcgcgtccaccagcccgtgggtcgcggcgatcctcccacatgtcatcagcaggatgggcaagctggagcaggtggacgtgaaccttttctgcctggtcgccacagacttctacagacaccagatagaggaggagctcgaccgcagggccttccagtctgtgcttgaggtggttgcagccccaggaagcccatatcaccggctgctgacttgtttacgaaatgtccacaaggtcaccacctgctgagcgccatggtgggagagactgtgaggcggcagctggggccggagcctttggaagtctgcgcccttgtgccctgcctccaccgagccagcttggtccctatgggcttccgcacatgccgcgggcggccaggcaacgtgcgtgtctctgccatgtggcagaagtgctctttgtggcagtggccaggcagggagtgtctgcagtcctggtggggctgagcctgaggccttccagaaagcaggagcagctgtgctgcaccccatgtgggtgaccaggtcctttctcctgatagtcacctgctggttgttgccaggttgcagctgctcttgcatctgggccagaagtcctccctcctgcaggctggctgttggcccctctgctgtcctgcagtagaaggtgccgtgagcaggctttgggaacactggcctgggtctccctggtggggtgtgcatgccacgccccgtgtctggatgcacagatgccatggcctgtgctgggccagtggctgggggtgctagacacccggcaccattctcccttctctcttttcttctcaggatttaaaatttaattatatcagtaaagagattaattttaacgtaactctttctatgcccgtgtaaagtatgtgaatcgcaaggcctgtgctgcatgcgacagcgtccggggtggtggacagggcccccggccacgctccctctcctgtagccactggcatagccctcctgagcacccgctgacatttccgttgtacatgttcctgtttatgcattcacaaggtgactgggatgtagagaggcgttagtgggcaggtggccacagcaggactgaggacaggcccccattatcctaggggtgcgctcacctgcagcccctcctcctcgggcacagacgactgtcgttctccacccaccagtcagggacagcagcctccctgtcactcagctgagaaggccagccctccctggctgtgagcagcctccactgtgtccagagacatgggcctcccactcctgttccttgctagccctggggtggcgtctgcctaggagctggctggcaggtgttgggacctgctgctccatggatgcatgccctaagagtgtcactgagctgtgttttgtctgagcctctctcggtcaacagcaaagcttggtgtcttggcactgttagtgacagagcccagcatcccttctgcccccgttccagctgacatcttgcacggtgaccccttttagtcaggagagtgcagatctgtgctcatcggagactgccccacggccctgtcagagccgccactcctatccccaggccaggtccctggaccagcctcctgtttgcaggcccagaggagccaagtcattaaaatggaagtggattctggatggccgggctgctgctgatgtaggagctggatttgggagctctgcttgccgactggctgtgagacgaggcaggggctctgcttcctcagccctagaggcgagccaggcaaggttggcgactgtcatgtggcttggtttggtcatgcccgtcgatgttttgggtattgaatgtggtaagtggaggaaatgttggaactctgtgcaggtgctgccttgagacccccaagcttccacctgtccctctcctatgtggcagctggggagcagctgagatgtggacttgtatgctgcccacatacgtgagggggagctgaaagggagcccctcctctgagcagcctctgccaggcctgtatgaggcttttcccaccagctcccaacagaggcctcccccagccaggaccacctcgtcctcgtggcggggcagcaggagcggtagaaaggggtccgatgtttgaggaggcccttaagggaagctactgaattataacacgtaagaaaatcaccattccgtattggttgggggctcctgtttctcatcctagctttttcctggaaagcccgctagaaggtttgggaacgaggggaaagttctcagaactgttggctgctccccacccgcctcccgcctcccccgcaggttatgtcagcagctctgagacagcagtatcacaggccagatgttgttcctggctagatgtttacatttgtaagaaataacactgtgaatgtaaaacagagccattcccttggaatgcatatcgctgggctcaacatagagtttgtcttcctcttgtttacgacgtgatctaaaccagtccttagcaaggggctcagaacaccccgctctggcagtaggtgtcccccacccccaaagacctgcctgtgtgctccggagatgaatatgagctcattagtaaaaatgacttcacccacgcatatacataaagtatccatgcatgtgcatatagacacatctataattttacacacacacctctcaagacggagatgcatggcctctaagagtgcccgtgtcggttcttcctggaagttgactttccttagacccgccaggtcaagttagccgcgtgacggacatccaggcgtgggacgtggtcagggcagggctcattcattgcccactaggatcccactggcgaagatggtctccatatcagctctctgcagaagggaggaagactttatcatgttcctaaaaatctgtggcaagcacccatcgtattatccaaattttgttgcaaatgtgattaatttggttgtcaagttttgggggtgggctgtggggagattgcttttgttttcctgctggtaatatcgggaaagattttaatgaaaccagggtagaattgtttggcaatgcactgaagcgtgtttctttcccaaaatgtgcctcccttccgctgcgggcccagctgagtctatgtaggtgatgtttccagctgccaagtgctctttgttactgtccaccctcatttctgccagcgcatgtgtcctttcaaggggaaaatgtgaagctgaaccccctccagacacccagaatgtagcatctgagaaggccctgtgccctaaaggacacccctcgcccccatcttcatggagggggtcatttcagagccctcggagccaatgaacagctcctcctcttggagctgagatgagccccacgtggagctcgggacggatagtagacagcaataactcggtgtgtggccgcctggcaggtggaacttcctcccgttgcggggtggagtgaggttagttctgtgtgtctggtgggtggagtcaggcttctcttgctacctgtgagcatccttcccagcagacatcctcatcgggctttgtccctcccccgcttcctccctctgcggggaggacccgggaccacagctgctggccagggtagacttggagctgtcctccagaggggtcacgtgtaggagtgagaagaaggaagatcttgagagctgctgagggaccttggagagctcaggatggctcagacgaggacactcgcttgccgggcctgggcctcctgggaaggagggagctgctcagaatgccgcatgacaactgaaggcaacctggaaggttcaggggccgctcttcccccatgtgcctgtcacgctctggtgcagtcaaaggaacgccttcccctcagttgtttctaagagcagagtctcccgctgcaatctgggtggtaactgccagccttggaggatcgtggccaacgtggacctgcctacggagggtgggctctgacccaagtggggcctccttgtccaggtctcactgctttgcaccgtggtcagagggactgtcagctgagcttgagctcccctggagccagcagggctgtgatgggcgagtcccggagccccacccagacctgaatgcttctgagagcaaagggaaggactgacgagagatgtatatttaattttttaactgctgcaaacattgtacatccaaattaaaggaaaaaaatggaaaccatcaaaaaaaaaaaaaaaaaa

SEQ ID NO: 3 - RNA, 21 nt, synthetic construct
  source 1..21: mol_type = other RNA; note = Description of Artificial Sequence: Synthetic oligonucleotide
ttaacgtcagttcataaactt

SEQ ID NO: 4 - DNA, 21 bp, synthetic construct
  source 1..21: mol_type = other DNA; note = Description of Artificial Sequence: Synthetic oligonucleotide; note = Description of Combined DNA/RNA Molecule: Synthetic oligonucleotide
  misc_feature 1..19: note = RNA
  misc_feature 20..21: note = DNA
ttaacgtcagttcataaactt

SEQ ID NO: 5 - RNA, 21 nt, synthetic construct
  source 1..21: mol_type = other RNA; note = Description of Artificial Sequence: Synthetic oligonucleotide
tgtcggtaccgtctaacactt

SEQ ID NO: 6 - DNA, 21 bp, synthetic construct
  source 1..21: mol_type = other DNA; note = Description of Artificial Sequence: Synthetic oligonucleotide; note = Description of Combined DNA/RNA Molecule: Synthetic oligonucleotide
  misc_feature 1..19: note = RNA
  misc_feature 20..21: note = DNA
tgtcggtaccgtctaacactt

SEQ ID NO: 7 - RNA, 21 nt, synthetic construct
  source 1..21: mol_type = other RNA; note = Description of Artificial Sequence: Synthetic oligonucleotide
taagcatggagctagcaggtt

SEQ ID NO: 8 - DNA, 21 bp, synthetic construct
  source 1..21: mol_type = other DNA; note = Description of Artificial Sequence: Synthetic oligonucleotide; note = Description of Combined DNA/RNA Molecule: Synthetic oligonucleotide
  misc_feature 1..19: note = RNA
  misc_feature 20..21: note = DNA
taagcatggagctagcaggtt

SEQ ID NO: 9 - RNA, 21 nt, synthetic construct
  source 1..21: mol_type = other RNA; note = Description of Artificial Sequence: Synthetic oligonucleotide
tacaacgagactgaattgctt

SEQ ID NO: 10 - DNA, 21 bp, synthetic construct
  source 1..21: mol_type = other DNA; note = Description of Artificial Sequence: Synthetic oligonucleotide; note = Description of Combined DNA/RNA Molecule: Synthetic oligonucleotide
  misc_feature 1..19: note = RNA
  misc_feature 20..21: note = DNA
tacaacgagactgaattgctt

SEQ ID NO: 11 - RNA, 21 nt, synthetic construct
  source 1..21: mol_type = other RNA; note = Description of Artificial Sequence: Synthetic oligonucleotide
ttcagttcataaacctggatt

SEQ ID NO: 12 - DNA, 21 bp, synthetic construct
  source 1..21: mol_type = other DNA; note = Description of Artificial Sequence: Synthetic oligonucleotide; note = Description of Combined DNA/RNA Molecule: Synthetic oligonucleotide
  misc_feature 1..19: note = RNA
  misc_feature 20..21: note = DNA
ttcagttcataaacctggatt

SEQ ID NO: 13 - RNA, 21 nt, synthetic construct
  source 1..21: mol_type = other RNA; note = Description of Artificial Sequence: Synthetic oligonucleotide
taacgtcagttcataaacctt

SEQ ID NO: 14 - DNA, 21 bp, synthetic construct
  source 1..21: mol_type = other DNA; note = Description of Artificial Sequence: Synthetic oligonucleotide; note = Description of Combined DNA/RNA Molecule: Synthetic oligonucleotide
  misc_feature 1..19: note = RNA
  misc_feature 20..21: note = DNA
taacgtcagttcataaacctt

SEQ ID NO: 15 - RNA, 21 nt, synthetic construct
  source 1..21: mol_type = other RNA; note = Description of Artificial Sequence: Synthetic oligonucleotide
tccggtcacaacattgtggtt

SEQ ID NO: 16 - DNA, 21 bp, synthetic construct
  source 1..21: mol_type = other DNA; note = Description of Artificial Sequence: Synthetic oligonucleotide; note = Description of Combined DNA/RNA Molecule: Synthetic oligonucleotide
  misc_feature 1..19: note = RNA
  misc_feature 20..21: note = DNA
tccggtcacaacattgtggtt

SEQ ID NO: 17 - RNA, 21 nt, synthetic construct
  source 1..21: mol_type = other RNA; note = Description of Artificial Sequence: Synthetic oligonucleotide
ttgcacggttctttgtgactt

SEQ ID NO: 18 - DNA, 21 bp, synthetic construct
  source 1..21: mol_type = other DNA; note = Description of Artificial Sequence: Synthetic oligonucleotide; note = Description of Combined DNA/RNA Molecule: Synthetic oligonucleotide
  misc_feature 1..19: note = RNA
  misc_feature 20..21: note = DNA
ttgcacggttctttgtgactt

SEQ ID NO: 19 - RNA, 21 nt, synthetic construct
  source 1..21: mol_type = other RNA; note = Description of Artificial Sequence: Synthetic oligonucleotide
ttttataacaagaggttcatt

SEQ ID NO: 20 - DNA, 21 bp, synthetic construct
  source 1..21: mol_type = other DNA; note = Description of Artificial Sequence: Synthetic oligonucleotide; note = Description of Combined DNA/RNA Molecule: Synthetic oligonucleotide
  misc_feature 1..19: note = RNA
  misc_feature 20..21: note = DNA
ttttataacaagaggttcatt

SEQ ID NO: 21 - RNA, 21 nt, synthetic construct
  source 1..21: mol_type = other RNA; note = Description of Artificial Sequence: Synthetic oligonucleotide
tccaaatactggttgtcggtt

SEQ ID NO: 22 - DNA, 21 bp, synthetic construct
  source 1..21: mol_type = other DNA; note = Description of Artificial Sequence: Synthetic oligonucleotide; note = Description of Combined DNA/RNA Molecule: Synthetic oligonucleotide
  misc_feature 1..19: note = RNA
  misc_feature 20..21: note = DNA
tccaaatactggttgtcggtt

SEQ ID NO: 23 - RNA, 21 nt, synthetic construct
  source 1..21: mol_type = other RNA; note = Description of Artificial Sequence: Synthetic oligonucleotide
tattttaggaattccaatgtt

SEQ ID NO: 24 - DNA, 21 bp, synthetic construct
  source 1..21: mol_type = other DNA; note = Description of Artificial Sequence: Synthetic oligonucleotide; note = Description of Combined DNA/RNA Molecule: Synthetic oligonucleotide
  misc_feature 1..19: note = RNA
  misc_feature 20..21: note = DNA
tattttaggaattccaatgtt

SEQ ID NO: 25 - RNA, 21 nt, synthetic construct
  source 1..21: mol_type = other RNA; note = Description of Artificial Sequence: Synthetic oligonucleotide
tttaggaattccaatgatctt

SEQ ID NO: 26 - DNA, 21 bp, synthetic construct
  source 1..21: mol_type = other DNA; note = Description of Artificial Sequence: Synthetic oligonucleotide; note = Description of Combined DNA/RNA Molecule: Synthetic oligonucleotide
  misc_feature 1..19: note = RNA
  misc_feature 20..21: note = DNA
tttaggaattccaatgatctt

SEQ ID NO: 27 - DNA, 21 bp, synthetic construct
  source 1..21: mol_type = other DNA; note = Description of Artificial Sequence: Synthetic oligonucleotide; note = Description of Combined DNA/RNA Molecule: Synthetic oligonucleotide
  misc_feature 1..19: note = RNA
  misc_feature 20..21: note = DNA
ttaatctctttactgatattt

SEQ ID NO: 28 - DNA, 21 bp, synthetic construct
  source 1..21: mol_type = other DNA; note = Description of Artificial Sequence: Synthetic oligonucleotide; note = Description of Combined DNA/RNA Molecule: Synthetic oligonucleotide
  misc_feature 1..19: note = RNA
  misc_feature 20..21: note = DNA
gattttaggaattccaatgtt

SEQ ID NO: 29 - RNA, 22 nt, synthetic construct
  source 1..22: mol_type = other RNA; note = Description of Artificial Sequence: Synthetic oligonucleotide
taagcatggagctagcaggctt

SEQ ID NO: 30 - DNA, 21 bp, synthetic construct
  source 1..21: mol_type = other DNA; note = Description of Artificial Sequence: Synthetic oligonucleotide; note = Description of Combined DNA/RNA Molecule: Synthetic oligonucleotide
taagcatggagctagcagggt

SEQ ID NO: 31 - RNA, 22 nt, synthetic construct
  source 1..22: mol_type = other RNA; note = Description of Artificial Sequence: Synthetic oligonucleotide
aaggacttgagggactcgaagt

SEQ ID NO: 32 - RNA, 21 nt, synthetic construct
  source 1..21: mol_type = other RNA; note = Description of Artificial Sequence: Synthetic oligonucleotide
aaggacttgagggactcgaag

SEQ ID NO: 33 - RNA, 19 nt, synthetic construct
  source 1..19: mol_type = other RNA; note = Description of Artificial Sequence: Synthetic oligonucleotide
aaggacttgagggactcga

SEQ ID NO: 34 - RNA, 21 nt, synthetic construct
  source 1..21: mol_type = other RNA; note = Description of Artificial Sequence: Synthetic oligonucleotide
aggacttgagggactcgaagt

SEQ ID NO: 35 - RNA, 22 nt, synthetic construct
  source 1..22: mol_type = other RNA; note = Description of Artificial Sequence: Synthetic oligonucleotide
gaggacttgagggactcgaagt

SEQ ID NO: 36 - RNA, 22 nt, synthetic construct
  source 1..22: mol_type = other RNA; note = Description of Artificial Sequence: Synthetic oligonucleotide
aaggacttgagggactcgaagt

SEQ ID NO: 37 - RNA, 23 nt, synthetic construct
  source 1..23: mol_type = other RNA; note = Description of Artificial Sequence: Synthetic oligonucleotide
aaggacttgagggactcgaagtt

SEQ ID NO: 38 - RNA, 21 nt, synthetic construct
  source 1..21: mol_type = other RNA; note = Description of Artificial Sequence: Synthetic oligonucleotide
aaggacttgagggactcgaag

SEQ ID NO: 39 - RNA, 19 nt, synthetic construct
  source 1..19: mol_type = other RNA; note = Description of Artificial Sequence: Synthetic oligonucleotide
aaggacttgagggactcga

SEQ ID NO: 40 - RNA, 22 nt, synthetic construct
  source 1..22: mol_type = other RNA; note = Description of Artificial Sequence: Synthetic oligonucleotide
aaggacttgagggactcgaagg

SEQ ID NO: 41 - RNA, 21 nt, synthetic construct
  source 1..21: mol_type = other RNA; note = Description of Artificial Sequence: Synthetic oligonucleotide
aaggacttgagggactcgaat

SEQ ID NO: 42 - RNA, 22 nt, synthetic construct
  source 1..22: mol_type = other RNA; note = Description of Artificial Sequence: Synthetic oligonucleotide
aaggacttgagggactcgaaga

SEQ ID NO: 43 - RNA, 22 nt, synthetic construct
  source 1..22: mol_type = other RNA; note = Description of Artificial Sequence: Synthetic oligonucleotide
aaggacttgagggactcgaagg

SEQ ID NO: 44 - RNA, 23 nt, synthetic construct
  source 1..23: mol_type = other RNA; note = Description of Artificial Sequence: Synthetic oligonucleotide
aaggacttgagggactcgaaggt

SEQ ID NO: 45 - RNA, 23 nt, synthetic construct
  source 1..23: mol_type = other RNA; note = Description of Artificial Sequence: Synthetic oligonucleotide
aaggacttgagggactcgaagga

SEQ ID NO: 46 - RNA, 21 nt, synthetic construct
  source 1..21: mol_type = other RNA; note = Description of Artificial Sequence: Synthetic oligonucleotide
aaggacttgagggactcgaag

SEQ ID NO: 47 - RNA, 22 nt, synthetic construct
  source 1..22: mol_type = other RNA; note = Description of Artificial Sequence: Synthetic oligonucleotide
aaggacttgagggactcgaagt

SEQ ID NO: 48 - RNA, 19 nt, synthetic construct
  source 1..19: mol_type = other RNA; note = Description of Artificial Sequence: Synthetic oligonucleotide
aaggacttgagggactcga

SEQ ID NO: 49 - RNA, 23 nt, synthetic construct
  source 1..23: mol_type = other RNA; note = Description of Artificial Sequence: Synthetic oligonucleotide
aaggacttgagggactcgaagga

SEQ ID NO: 50 - RNA, 22 nt, synthetic construct
  source 1..22: mol_type = other RNA; note = Description of Artificial Sequence: Synthetic oligonucleotide
aaggacttgagggactcgaagg

SEQ ID NO: 51 - RNA, 24 nt, synthetic construct
  source 1..24: mol_type = other RNA; note = Description of Artificial Sequence: Synthetic oligonucleotide
aaggacttgagggactcgaaggat

SEQ ID NO: 52 - RNA, 25 nt, synthetic construct
  source 1..25: mol_type = other RNA; note = Description of Artificial Sequence: Synthetic oligonucleotide
aaggacttgagggactcgaaggatt

SEQ ID NO: 53 - RNA, 21 nt, synthetic construct
  source 1..21: mol_type = other RNA; note = Description of Artificial Sequence: Synthetic oligonucleotide
aaggacttgagggactcgaag

SEQ ID NO: 54 - RNA, 24 nt, synthetic construct
  source 1..24: mol_type = other RNA; note = Description of Artificial Sequence: Synthetic oligonucleotide
aaggacttgagggactcgaaggaa

SEQ ID NO: 55 - RNA, 23 nt, synthetic construct
  source 1..23: mol_type = other RNA; note = Description of Artificial Sequence: Synthetic oligonucleotide
gatgaagtgcacacattggatga

SEQ ID NO: 56 - RNA, 22 nt, synthetic construct
  source 1..22: mol_type = other RNA; note = Description of Artificial Sequence: Synthetic oligonucleotide
gatgaactgcacacattggatg

SEQ ID NO: 57 - RNA, 23 nt, synthetic construct
  source 1..23: mol_type = other RNA; note = Description of Artificial Sequence: Synthetic oligonucleotide
gatgaattgcacacagtagatga

SEQ ID NO: 58 - RNA, 24 nt, synthetic construct
  source 1..24: mol_type = other RNA; note = Description of Artificial Sequence: Synthetic oligonucleotide
aaggacttgagggactcgaaggtt

SEQ ID NO: 59 - RNA, 25 nt, synthetic construct
  source 1..25: mol_type = other RNA; note = Description of Artificial Sequence: Synthetic oligonucleotide
aaggacttgagggactcgaaggttt

SEQ ID NO: 60 - RNA, 23 nt, synthetic construct
  source 1..23: mol_type = other RNA; note = Description of Artificial Sequence: Synthetic oligonucleotide
aaggacttgagggactcgaaggt

SEQ ID NO: 61 - RNA, 26 nt, synthetic construct
  source 1..26: mol_type = other RNA; note = Description of Artificial Sequence: Synthetic oligonucleotide
aaggacttgagggactcgaaggtttt

SEQ ID NO: 62 - RNA, 27 nt, synthetic construct
  source 1..27: mol_type = other RNA; note = Description of Artificial Sequence: Synthetic oligonucleotide
aaggacttgagggactcgaaggttttt

SEQ ID NO: 63 - RNA, 22 nt, synthetic construct
  source 1..22: mol_type = other RNA; note = Description of Artificial Sequence: Synthetic oligonucleotide
aaggacttgagggactcgaagg

SEQ ID NO: 64 - RNA, 22 nt, synthetic construct
  source 1..22: mol_type = other RNA; note = Description of Artificial Sequence: Synthetic oligonucleotide
taaggacttgagggactcgaag

SEQ ID NO: 65 - RNA, 21 nt, synthetic construct
  source 1..21: mol_type = other RNA; note = Description of Artificial Sequence: Synthetic oligonucleotide
aaggacttgagggactcgaag

SEQ ID NO: 66 - RNA, 22 nt, synthetic construct
  source 1..22: mol_type = other RNA; note = Description of Artificial Sequence: Synthetic oligonucleotide
aaggacttgagggactcgaagt

SEQ ID NO: 67 - RNA, 30 nt, synthetic construct
  source 1..30: mol_type = other RNA; note = Description of Artificial Sequence: Synthetic oligonucleotide
aaggacttgagggactcgaagacgagtccc

SEQ ID NO: 68 - RNA, 31 nt, synthetic construct
  source 1..31: mol_type = other RNA; note = Description of Artificial Sequence: Synthetic oligonucleotide
aaggacttgagggactcgaagacgagtccca

SEQ ID NO: 69 - RNA, 31 nt, synthetic construct
  source 1..31: mol_type = other RNA; note = Description of Artificial Sequence: Synthetic oligonucleotide
aaggacttgagggactcgaagacgagtccct

SEQ ID NO: 70 - RNA, 23 nt, synthetic construct
  source 1..23: mol_type = other RNA; note = Description of Artificial Sequence: Synthetic oligonucleotide
gatgaagtgcacacattggatac

SEQ ID NO: 71 - RNA, 24 nt, synthetic construct
  source 1..24: mol_type = other RNA; note = Description of Artificial Sequence: Synthetic oligonucleotide
gatgaagtgcacacattggataca

SEQ ID NO: 72 - RNA, 30 nt, synthetic construct
  source 1..30: mol_type = other RNA; note = Description of Artificial Sequence: Synthetic oligonucleotide
gatgaagtgcacacattggatacaatgtgt

SEQ ID NO: 73 - RNA, 21 nt, synthetic construct
  source 1..21: mol_type = other RNA; note = Description of Artificial Sequence: Synthetic oligonucleotide
gatgaagtgcacacattggat

SEQ ID NO: 74 - RNA, 22 nt, synthetic construct
  source 1..22: mol_type = other RNA; note = Description of Artificial Sequence: Synthetic oligonucleotide
gatgaagtgcacacattggata

SEQ ID NO: 75 - RNA, 23 nt, synthetic construct
  source 1..23: mol_type = other RNA; note = Description of Artificial Sequence: Synthetic oligonucleotide
gatgaattgcacacagtagatat

SEQ ID NO: 76 - RNA, 25 nt, synthetic construct
  source 1..25: mol_type = other RNA; note = Description of Artificial Sequence: Synthetic oligonucleotide
gatgaattgcacacagtagatatac

SEQ ID NO: 77 - RNA, 30 nt, synthetic construct
  source 1..30: mol_type = other RNA; note = Description of Artificial Sequence: Synthetic oligonucleotide
gatgaattgcacacagtagatatactgtgt

SEQ ID NO: 78 - RNA, 24 nt, synthetic construct
  source 1..24: mol_type = other RNA; note = Description of Artificial Sequence: Synthetic oligonucleotide
gatgaattgcacacagtagatata

SEQ ID NO: 79 - RNA, 24 nt, synthetic construct
  source 1..24: mol_type = other RNA; note = Description of Artificial Sequence: Synthetic oligonucleotide
atgaattgcacacagtagatatac

SEQ ID NO: 80 - RNA, 22 nt, synthetic construct
  source 1..22: mol_type = other RNA; note = Description of Artificial Sequence: Synthetic oligonucleotide
gatgaattgcacacagtagata

SEQ ID NO: 81 - RNA, 30 nt, synthetic construct; identical to SEQ ID NO: 77
  source 1..30: mol_type = other RNA; note = Description of Artificial Sequence: Synthetic oligonucleotide

SEQ ID NO: 82 - RNA, 20 nt, synthetic construct
  source 1..20: mol_type = other RNA; note = Description of Artificial Sequence: Synthetic oligonucleotide
tacaacgagactgaattgct

SEQ ID NO: 83 - RNA, 20 nt, synthetic construct
  source 1..20: mol_type = other RNA; note = Description of Artificial Sequence: Synthetic oligonucleotide
acaacgagactgaattgctt

SEQ ID NO: 84 - RNA, 22 nt, synthetic construct
  source 1..22: mol_type = other RNA; note = Description of Artificial Sequence: Synthetic oligonucleotide
tccggtcacaacattgtggttc

SEQ ID NO: 85 - RNA, 20 nt, synthetic construct
  source 1..20: mol_type = other RNA; note = Description of Artificial Sequence: Synthetic oligonucleotide
tccggtcacaacattgtggt

SEQ ID NO: 86 - RNA, 18 nt, synthetic construct
  source 1..18: mol_type = other RNA; note = Description of Artificial Sequence: Synthetic oligonucleotide
tccggtcacaacattgtg

SEQ ID NO: 87 - RNA, 20 nt, synthetic construct
  source 1..20: mol_type = other RNA; note = Description of Artificial Sequence: Synthetic oligonucleotide
ccggtcacaacattgtggtt

SEQ ID NO: 88 - RNA, 20 nt, synthetic construct
  source 1..20: mol_type = other RNA; note = Description of Artificial Sequence: Synthetic oligonucleotide
ttttataacaagaggttcat

SEQ ID NO: 89 - RNA, 20 nt, synthetic construct
  source 1..20: mol_type = other RNA; note = Description of Artificial Sequence: Synthetic oligonucleotide
tttataacaagaggttcatt

SEQ ID NO: 90 - RNA, 20 nt, synthetic construct
  source 1..20: mol_type = other RNA; note = Description of Artificial Sequence: Synthetic oligonucleotide
taagcatggagctagcaggt

SEQ ID NO: 91 - RNA, 20 nt, synthetic construct
  source 1..20: mol_type = other RNA; note = Description of Artificial Sequence: Synthetic oligonucleotide
aagcatggagctagcaggtt

SEQ ID NO: 92 - RNA, 20 nt, synthetic construct
  source 1..20: mol_type = other RNA; note = Description of Artificial Sequence: Synthetic oligonucleotide
ccaaatactggttgtcggtt

SEQ ID NO: 93 - RNA, 22 nt, synthetic construct
  source 1..22: mol_type = other RNA; note = Description of Artificial Sequence: Synthetic oligonucleotide
tacaacgagactgaattgcttt

SEQ ID NO: 94 - RNA, 22 nt, synthetic construct
  source 1..22: mol_type = other RNA; note = Description of Artificial Sequence: Synthetic oligonucleotide
taacgtcagttcataaaccttt

SEQ ID NO: 95 - RNA, 22 nt, synthetic construct
  source 1..22: mol_type = other RNA; note = Description of Artificial Sequence: Synthetic oligonucleotide
gtccggtcacaacattgtggtt

SEQ ID NO: 96 - RNA, 23 nt, synthetic construct
  source 1..23: mol_type = other RNA; note = Description of Artificial Sequence: Synthetic oligonucleotide
tccggtcacaacattgtggtttg

SEQ ID NO: 97 - RNA, 22 nt, synthetic construct
  source 1..22: mol_type = other RNA; note = Description of Artificial Sequence: Synthetic oligonucleotide
tccggtcacaacattgtggttt

SEQ ID NO: 98 - RNA, 19 nt, synthetic construct
  source 1..19: mol_type = other RNA; note = Description of Artificial Sequence: Synthetic oligonucleotide
tccggtcacaacattgtgg

SEQ ID NO: 99 - RNA, 22 nt, synthetic construct
  source 1..22: mol_type = other RNA; note = Description of Artificial Sequence: Synthetic oligonucleotide
taagcatggagctagcaggttt

SEQ ID NO: 100 - RNA, 21 nt, synthetic construct
  source 1..21: mol_type = other RNA; note = Description of Artificial Sequence: Synthetic oligonucleotide
aagcatggagctagcaggttt

SEQ ID NO: 101 - RNA, 22 nt, synthetic construct
  source 1..22: mol_type = other RNA; note = Description of Artificial Sequence: Synthetic oligonucleotide
tccaaatactggttgtcggttt

SEQ ID NO: 102 - RNA, 21 nt, synthetic construct
  source 1..21: mol_type = other RNA; note = Description of Artificial Sequence: Synthetic oligonucleotide
ccaaatactggttgtcggttt

SEQ ID NO: 103 - RNA, 21 nt, synthetic construct
  source 1..21: mol_type = other RNA; note = Description of Artificial Sequence: Synthetic oligonucleotide
gtttatgaactgatcttaccc

SEQ ID NO: 104 - RNA, 21 nt, synthetic construct
  source 1..21: mol_type = other RNA; note = Description of Artificial Sequence: Synthetic oligonucleotide
gtgttagacggtactgatccc

SEQ ID NO: 105 - RNA, 21 nt, synthetic construct
  source 1..21: mol_type = other RNA; note = Description of Artificial Sequence: Synthetic oligonucleotide
cctgctagctccatgcttccc

SEQ ID NO: 106 - RNA, 21 nt, synthetic construct
  source 1..21: mol_type = other RNA; note = Description of Artificial Sequence: Synthetic oligonucleotide
gtttatgaactgatcttagcc

SEQ ID NO: 107 - RNA, 21 nt, synthetic construct
  source 1..21: mol_type = other RNA; note = Description of Artificial Sequence: Synthetic oligonucleotide
gtgttagacggtactgatgcc

SEQ ID NO: 108 - RNA, 21 nt, synthetic construct
  source 1..21: mol_type = other RNA; note = Description of Artificial Sequence: Synthetic oligonucleotide
cctgctagctccatgcttgcc

SEQ ID NO: 109 - RNA, 21 nt, synthetic construct
  source 1..21: mol_type = other RNA; note = Description of Artificial Sequence: Synthetic oligonucleotide
gtttatgaagtgatcttaacc

SEQ ID NO: 110 - RNA, 21 nt, synthetic construct
  source 1..21: mol_type = other RNA; note = Description of Artificial Sequence: Synthetic oligonucleotide
gtgttagaccgtactgatacc

SEQ ID NO: 111 - RNA, 21 nt, synthetic construct
  source 1..21: mol_type = other RNA; note = Description of Artificial Sequence: Synthetic oligonucleotide
cctgctagcaccatgcttacc

SEQ ID NO: 112 - RNA, 21 nt, synthetic construct
  source 1..21: mol_type = other RNA; note = Description of Artificial Sequence: Synthetic oligonucleotide
gtttatgaactgatcttaacc

SEQ ID NO: 113 - RNA, 21 nt, synthetic construct
  source 1..21: mol_type = other RNA; note = Description of Artificial Sequence: Synthetic oligonucleotide
gtgttagacggtactgatacc

SEQ ID NO: 114 - RNA, 21 nt, synthetic construct
  source 1..21: mol_type = other RNA; note = Description of Artificial Sequence: Synthetic oligonucleotide
cctgctagctccatgcttacc

SEQ ID NO: 115 - DNA, 21 bp, synthetic construct
  source 1..21: mol_type = other DNA; note = Description of Artificial Sequence: Synthetic oligonucleotide; note = Description of Combined DNA/RNA Molecule: Synthetic oligonucleotide
  misc_feature 1..19: note = RNA
  misc_feature 20..21: note = DNA
cctgctagctccatgcttatt

SEQ ID NO: 116 - RNA, 21 nt, synthetic construct
  source 1..21: mol_type = other RNA; note = Description of Artificial Sequence: Synthetic oligonucleotide
gtttatgaactgatcttgccc

SEQ ID NO: 117 - RNA, 21 nt, synthetic construct
  source 1..21: mol_type = other RNA; note = Description of Artificial Sequence: Synthetic oligonucleotide
gtttatgaactgatcttggcc

SEQ ID NO: 118 - RNA, 21 nt, synthetic construct
  source 1..21: mol_type = other RNA; note = Description of Artificial Sequence: Synthetic oligonucleotide
gtttatgaactgatcttgacc

SEQ ID NO: 119 - RNA, 21 nt, synthetic construct
  source 1..21: mol_type = other RNA; note = Description of Artificial Sequence: Synthetic oligonucleotide
gcaattcagtctcgttgtccc

SEQ ID NO: 120 - RNA, 21 nt, synthetic construct
  source 1..21: mol_type = other RNA; note = Description of Artificial Sequence: Synthetic oligonucleotide
tccaggtttatgaactgaccc

SEQ ID NO: 121 - RNA, 21 nt, synthetic construct
  source 1..21: mol_type = other RNA; note = Description of Artificial Sequence: Synthetic oligonucleotide
ggtttatgaactgacgttccc

SEQ ID NO: 122 - RNA, 21 nt, synthetic construct
  source 1..21: mol_type = other RNA; note = Description of Artificial Sequence: Synthetic oligonucleotide
ccacaatgttgtgactggccc

SEQ ID NO: 123 - RNA, 21 nt, synthetic construct
  source 1..21: mol_type = other RNA; note = Description of Artificial Sequence: Synthetic oligonucleotide
gtcacaaagaaccgtgtaccc

SEQ ID NO: 124 - RNA, 21 nt, synthetic construct
  source 1..21: mol_type = other RNA; note = Description of Artificial Sequence: Synthetic oligonucleotide
tgaacctcttgttataaaccc

SEQ ID NO: 125 - RNA, 21 nt, synthetic construct
  source 1..21: mol_type = other RNA; note = Description of Artificial Sequence: Synthetic oligonucleotide
ccgacaaccagtatttggccc

SEQ ID NO: 126 - RNA, 21 nt, synthetic construct
  source 1..21: mol_type = other RNA; note = Description of Artificial Sequence: Synthetic oligonucleotide
gcaattcagtctcgttgtgcc

SEQ ID NO: 127 - RNA, 21 nt, synthetic construct
  source 1..21: mol_type = other RNA; note = Description of Artificial Sequence: Synthetic oligonucleotide
tccaggtttatgaactgagcc

SEQ ID NO: 128 - RNA, 21 nt, synthetic construct
  source 1..21: mol_type = other RNA; note = Description of Artificial Sequence: Synthetic oligonucleotide
ggtttatgaactgacgttgcc

SEQ ID NO: 129 - RNA, 21 nt, synthetic construct
  source 1..21: mol_type = other RNA; note = Description of Artificial Sequence: Synthetic oligonucleotide
ccacaatgttgtgactgggcc

SEQ ID NO: 130 - RNA, 21 nt, synthetic construct
  source 1..21: mol_type = other RNA; note = Description of Artificial Sequence: Synthetic oligonucleotide
gtcacaaagaaccgtgtagcc

SEQ ID NO: 131 - RNA, 21 nt, synthetic construct
  source 1..21: mol_type = other RNA; note = Description of Artificial Sequence: Synthetic oligonucleotide
tgaacctcttgttataaagcc

SEQ ID NO: 132 - RNA, 21 nt, synthetic construct
  source 1..21: mol_type = other RNA; note = Description of Artificial Sequence: Synthetic oligonucleotide
ccgacaaccagtatttgggcc

SEQ ID NO: 133 - RNA, 21 nt, synthetic construct
  source 1..21: mol_type = other RNA; note = Description of Artificial Sequence: Synthetic oligonucleotide
gcaattcagtctcgttgtacc

SEQ ID NO: 134 - DNA, 21 bp, synthetic construct
  source 1..21: mol_type = other DNA; note = Description of Artificial Sequence: Synthetic oligonucleotide; note = Description of Combined DNA/RNA Molecule: Synthetic oligonucleotide
  misc_feature 1..19: note = RNA
  misc_feature 20..21: note = DNA
gcaattcagtctcgttgtatt

SEQ ID NO: 135 - RNA, 21 nt, synthetic construct
  source 1..21: mol_type = other RNA; note = Description of Artificial Sequence: Synthetic oligonucleotide
tccaggtttatgaactgaacc

SEQ ID NO: 136 - DNA, 21 bp, synthetic construct
  source 1..21: mol_type = other DNA; note = Description of Artificial Sequence: Synthetic oligonucleotide; note = Description of Combined DNA/RNA Molecule: Synthetic oligonucleotide
  misc_feature 1..19: note = RNA
  misc_feature 20..21: note = DNA
tccaggtttatgaactgaatt

SEQ ID NO: 137 - RNA, 21 nt, synthetic construct
  source 1..21: mol_type = other RNA; note = Description of Artificial Sequence: Synthetic oligonucleotide
ggtttatgaactgacgttacc

SEQ ID NO: 138 - RNA, 21 nt, synthetic construct
  source 1..21: mol_type = other RNA; note = Description of Artificial Sequence: Synthetic oligonucleotide
ccacaatgttgtgactggacc

SEQ ID NO: 139 - RNA, 21 nt, synthetic construct
  source 1..21: mol_type = other RNA; note = Description of Artificial Sequence: Synthetic oligonucleotide
gtcacaaagaaccgtgtaacc

SEQ ID NO: 140 - RNA, 21 nt, synthetic construct
  source 1..21: mol_type = other RNA; note = Description of Artificial Sequence: Synthetic oligonucleotide
tgaacctcttgttataaaacc

SEQ ID NO: 141 - DNA, 21 bp, synthetic construct
  source 1..21: mol_type = other DNA; note = Description of Artificial Sequence: Synthetic oligonucleotide; note = Description of Combined DNA/RNA Molecule: Synthetic oligonucleotide
  misc_feature 1..19: note = RNA
  misc_feature 20..21: note = DNA
tgaacctcttgttataaaatt

SEQ ID NO: 142 - RNA, 21 nt, synthetic construct
  source 1..21: mol_type = other RNA; note = Description of Artificial Sequence: Synthetic oligonucleotide
ccgacaaccagtatttggacc

SEQ ID NO: 143 - DNA, 21 bp, synthetic construct
  source 1..21: mol_type = other DNA; note = Description of Artificial Sequence: Synthetic oligonucleotide; note = Description of Combined DNA/RNA Molecule: Synthetic oligonucleotide
  misc_feature 1..19: note = RNA
  misc_feature 20..21: note = DNA
ccgacaaccagtatttggatt

SEQ ID NO: 144 - RNA, 21 nt, synthetic construct
  source 1..21: mol_type = other RNA; note = Description of Artificial Sequence: Synthetic oligonucleotide
gcaattcagactcgttgtacc

SEQ ID NO: 145 - RNA, 21 nt, synthetic construct
  source 1..21: mol_type = other RNA; note = Description of Artificial Sequence: Synthetic oligonucleotide
tccaggtttttgaactgaacc

SEQ ID NO: 146 - RNA, 21 nt, synthetic construct
  source 1..21: mol_type = other RNA; note = Description of Artificial Sequence: Synthetic oligonucleotide
ggtttatgatctgacgttacc

SEQ ID NO: 147 - RNA, 21 nt, synthetic construct
  source 1..21: mol_type = other RNA; note = Description of Artificial Sequence: Synthetic oligonucleotide
ccacaatgtagtgactggacc

SEQ ID NO: 148 - RNA, 21 nt, synthetic construct
  source 1..21: mol_type = other RNA; note = Description of Artificial Sequence: Synthetic oligonucleotide
gtcacaaagtaccgtgtaacc

SEQ ID NO: 149 - RNA, 21 nt, synthetic construct
  source 1..21: mol_type = other RNA; note = Description of Artificial Sequence: Synthetic oligonucleotide
tgaacctctagttataaaacc

SEQ ID NO: 150 - RNA, 21 nt, synthetic construct
  source 1..21: mol_type = other RNA; note = Description of Artificial Sequence: Synthetic oligonucleotide
ccgacaacctgtatttggacc

SEQ ID NO: 151 - RNA, 21 nt, synthetic construct
  source 1..21: mol_type = other RNA; note = Description of Artificial Sequence: Synthetic oligonucleotide
cattggaattcctaaaattcc

SEQ ID NO: 152 - RNA, 21 nt, synthetic construct
  source 1..21: mol_type = other RNA; note = Description of Artificial Sequence: Synthetic oligonucleotide
gatcattggaattcctaatcc

SEQ ID NO: 153 - RNA, 21 nt, synthetic construct
  source 1..21: mol_type = other RNA; note = Description of Artificial Sequence: Synthetic oligonucleotide
cattggaattcctaaaatgcc

SEQ ID NO: 154 - RNA, 21 nt, synthetic construct
  source 1..21: mol_type = other RNA; note = Description of Artificial Sequence: Synthetic oligonucleotide
gatcattggaattcctaagcc

SEQ ID NO: 155 - RNA, 21 nt, synthetic construct
  source 1..21: mol_type = other RNA; note = Description of Artificial Sequence: Synthetic oligonucleotide
cattggaattcctaaaatacc

SEQ ID NO: 156 - DNA, 21 bp, synthetic construct
  source 1..21: mol_type = other DNA; note = Description of Artificial Sequence: Synthetic oligonucleotide; note = Description of Combined DNA/RNA Molecule: Synthetic oligonucleotide
  misc_feature 1..19: note = RNA
  misc_feature 20..21: note = DNA
cattggaattcctaaaatatt

SEQ ID NO: 157 - RNA, 21 nt, synthetic construct
  source 1..21: mol_type = other RNA; note = Description of Artificial Sequence: Synthetic oligonucleotide
gatcattggaattcctaaacc

SEQ ID NO: 158 - DNA, 21 bp, synthetic construct
  source 1..21: mol_type = other DNA; note = Description of Artificial Sequence: Synthetic oligonucleotide; note = Description of Combined DNA/RNA Molecule: Synthetic oligonucleotide
  misc_feature 1..19: note = RNA
  misc_feature 20..21: note = DNA
gatcattggaattcctaaatt

SEQ ID NO: 159 - RNA, 21 nt, synthetic construct
  source 1..21: mol_type = other RNA; note = Description of Artificial Sequence: Synthetic oligonucleotide
cattggaatacctaaaatacc

SEQ ID NO: 160 - RNA, 21 nt, synthetic construct
  source 1..21: mol_type = other RNA; note = Description of Artificial Sequence: Synthetic oligonucleotide
gatcattggtattcctaaacc

SEQ ID NO: 161 - DNA, 21 bp, synthetic construct
  source 1..21: mol_type = other DNA; note = Description of Artificial Sequence: Synthetic oligonucleotide; note = Description of Combined DNA/RNA Molecule: Synthetic oligonucleotide
  misc_feature 1..19: note = RNA
  misc_feature 20..21: note = DNA
gtttatgaactgacgttaatt

SEQ ID NO: 162 - DNA, 21 bp, synthetic construct
  source 1..21: mol_type = other DNA; note = Description of Artificial Sequence: Synthetic oligonucleotide; note = Description of Combined DNA/RNA Molecule: Synthetic oligonucleotide
  misc_feature 1..19: note = RNA
  misc_feature 20..21: note = DNA
gtgttagacggtaccgacatt

SEQ ID NO: 163 - DNA, 21 bp, synthetic construct
  source 1..21: mol_type = other DNA; note = Description of Artificial Sequence: Synthetic oligonucleotide; note = Description of Combined DNA/RNA Molecule: Synthetic oligonucleotide
  misc_feature 1..19: note = RNA
  misc_feature 20..21: note = DNA
atatcagtaaagagattaatt

SEQ ID NO: 164 - DNA, 21 bp, synthetic construct
  source 1..21: mol_type = other DNA; note = Description of Artificial Sequence: Synthetic oligonucleotide; note = Description of Combined DNA/RNA Molecule: Synthetic oligonucleotide
  misc_feature 1..19: note = RNA
  misc_feature 20..21: note = DNA
ggtttatgaactgacgttatt

SEQ ID NO: 165 - DNA, 21 bp, synthetic construct
  source 1..21: mol_type = other DNA; note = Description of Artificial Sequence: Synthetic oligonucleotide; note = Description of Combined DNA/RNA Molecule: Synthetic oligonucleotide
  misc_feature 1..19: note = RNA
  misc_feature 20..21: note = DNA
ccacaatgttgtgaccggatt

SEQ ID NO: 166 - DNA, 21 bp, synthetic construct
  source 1..21: mol_type = other DNA; note = Description of Artificial Sequence: Synthetic oligonucleotide; note = Description of Combined DNA/RNA Molecule: Synthetic oligonucleotide
  misc_feature 1..19: note = RNA
  misc_feature 20..21: note = DNA
gtcacaaagaaccgtgcaatt

SEQ ID NO: 167 - DNA, 21 bp, synthetic construct
  source 1..21: mol_type = other DNA; note = Description of Artificial Sequence: Synthetic oligonucleotide; note = Description of Combined DNA/RNA Molecule: Synthetic oligonucleotide
  misc_feature 1..19: note = RNA
  misc_feature 20..21: note = DNA
cattggaattcctaaaatctt

SEQ ID NO: 168 - RNA, 21 nt, synthetic construct
  source 1..21: mol_type = other RNA; note = Description of Artificial Sequence: Synthetic oligonucleotide
cctgctagctccatgcttgct

SEQ ID NO: 169 - RNA, 21 nt, synthetic construct
  source 1..21: mol_type = other RNA; note = Description of Artificial Sequence: Synthetic oligonucleotide
cctgctagctccatgcttgat

SEQ ID NO: 170 - RNA, 21 nt, synthetic construct
  source 1..21: mol_type = other RNA; note = Description of Artificial Sequence: Synthetic oligonucleotide
cctgctagctccatgcttatt

SEQ ID NO: 171 - RNA, 21 nt, synthetic construct
  source 1..21: mol_type = other RNA; note = Description of Artificial Sequence: Synthetic oligonucleotide
cctgctagctccatgcttgtt

SEQ ID NO: 172 - RNA, 20 nt, synthetic construct
  source 1..20: mol_type = other RNA; note = Description of Artificial Sequence: Synthetic oligonucleotide
ttcgagtccctcaagtagct

SEQ ID NO: 173 - RNA, 22 nt, synthetic construct
  source 1..22: mol_type = other RNA; note = Description of Artificial Sequence: Synthetic oligonucleotide
ttcgagtccctcaagtagcttt

SEQ ID NO: 174 - RNA, 22 nt, synthetic construct
  source 1..22: mol_type = other RNA; note = Description of Artificial Sequence: Synthetic oligonucleotide
tcgagtccctcaagtccattct

SEQ ID NO: 175 - RNA, 21 nt, synthetic construct
  source 1..21: mol_type = other RNA; note = Description of Artificial Sequence: Synthetic oligonucleotide
ttccagtccatcaagtcaatt

SEQ ID NO: 176 - RNA, 22 nt, synthetic construct
  source 1..22: mol_type = other RNA; note = Description of Artificial Sequence: Synthetic oligonucleotide
ttccgagtctaaaagtccttgg

SEQ ID NO: 177 - RNA, 23 nt, synthetic construct
  source 1..23: mol_type = other RNA; note = Description of Artificial Sequence: Synthetic oligonucleotide
ttccgagtctaaaagtccttggc

SEQ ID NO: 178 - RNA, 23 nt, synthetic construct
  source 1..23: mol_type = other RNA; note = Description of Artificial Sequence: Synthetic oligonucleotide
cttccgagtctaaaagtccttgg

SEQ ID NO: 179 - RNA, 23 nt, synthetic construct
  source 1..23: mol_type = other RNA; note = Description of Artificial Sequence: Synthetic oligonucleotide
ttccgagtctaaaagtccttggt

SEQ ID NO: 180 - RNA, 24 nt, synthetic construct
  source 1..24: mol_type = other RNA; note = Description of Artificial Sequence: Synthetic oligonucleotide
ttccgagtctaaaagtccttggct

SEQ ID NO: 181 - RNA, 23 nt, synthetic construct
  source 1..23: mol_type = other RNA; note = Description of Artificial Sequence: Synthetic oligonucleotide
tccaatgtgaaacttcatcggct

SEQ ID NO: 182 - RNA, 22 nt, synthetic construct
  source 1..22: mol_type = other RNA; note = Description of Artificial Sequence: Synthetic oligonucleotide
tccaatgtgaaacttcatcggc

SEQ ID NO: 183 - RNA, 22 nt, synthetic construct
  source 1..22: mol_type = other RNA; note = Description of Artificial Sequence: Synthetic oligonucleotide
atccaatgtgaaacttcatcgt

SEQ ID NO: 184 - RNA, 23 nt, synthetic construct
  source 1..23: mol_type = other RNA; note = Description of Artificial Sequence: Synthetic oligonucleotide
atccaatgtgaaacttcatcggt

SEQ ID NO: 185 - RNA, 22 nt, synthetic construct
  source 1..22: mol_type = other RNA; note = Description of Artificial Sequence: Synthetic oligonucleotide
tccaatgtgaaacttcatcggt

SEQ ID NO: 186 - RNA, 24 nt, synthetic construct
  source 1..24: mol_type = other RNA; note = Description of Artificial Sequence: Synthetic oligonucleotide
tccaatgtgaaacttcatcggctt

SEQ ID NO: 187 - RNA, 22 nt, synthetic construct
  source 1..22: mol_type = other RNA; note = Description of Artificial Sequence: Synthetic oligonucleotide
atctactgtgaaaattcatcgg

SEQ ID NO: 188 - RNA, 21 nt, synthetic construct
  source 1..21: mol_type = other RNA; note = Description of Artificial Sequence: Synthetic oligonucleotide
tctactgtgaaaattcatcgg

SEQ ID NO: 189 - RNA, 22 nt, synthetic construct
  source 1..22: mol_type = other RNA; note = Description of Artificial Sequence: Synthetic oligonucleotide
tctactgtgaaaattcatcggc

SEQ ID NO: 190 - RNA, 23 nt, synthetic construct
  source 1..23: mol_type = other RNA; note = Description of Artificial Sequence: Synthetic oligonucleotide
atctactgtgaaaattcatcggt

SEQ ID NO: 191 - RNA, 22 nt, synthetic construct
  source 1..22: mol_type = other RNA; note = Description of Artificial Sequence: Synthetic oligonucleotide
tctactgtgaaaattcatcggt

SEQ ID NO: 192 - RNA, 23 nt, synthetic construct
  source 1..23: mol_type = other RNA; note = Description of Artificial Sequence: Synthetic oligonucleotide
tctactgtgaaaattcatcggct

SEQ ID NO: 193 - RNA, 22 nt, synthetic construct
  source 1..22: mol_type = other RNA; note = Description of Artificial Sequence: Synthetic oligonucleotide
ccttcggtcctcaagtccttca

SEQ ID NO: 194 - RNA, 24 nt, synthetic construct
  source 1..24: mol_type = other RNA; note = Description of Artificial Sequence: Synthetic oligonucleotide
ttcgagtccatcaaatcctatagt

SEQ ID NO: 195 - RNA, 21 nt, synthetic construct
  source 1..21: mol_type = other RNA; note = Description of Artificial Sequence: Synthetic oligonucleotide
tacaatgtgtgcacttcatat

SEQ ID NO: 196 - RNA, 23 nt, synthetic construct
  source 1..23: mol_type = other RNA; note = Description of Artificial Sequence: Synthetic oligonucleotide
tatactgtgtgcaattcatttct

SEQ ID NO: 197 - RNA, 20 nt, synthetic construct
  source 1..20: mol_type = other RNA; note = Description of Artificial Sequence: Synthetic oligonucleotide
gcaattcagtctcgttgtcc

SEQ ID NO: 198 - RNA, 19 nt, synthetic construct
  source 1..19: mol_type = other RNA; note = Description of Artificial Sequence: Synthetic oligonucleotide
gcaattcagtctcgttgtc

SEQ ID NO: 199 - RNA, 20 nt, synthetic construct
  source 1..20: mol_type = other RNA; note = Description of Artificial Sequence: Synthetic oligonucleotide
caattcagtctcgttgtccc

SEQ ID NO: 200 - RNA, 19 nt, synthetic construct
  source 1..19: mol_type = other RNA; note = Description of Artificial Sequence: Synthetic oligonucleotide
caattcagtctcgttgtcc

SEQ ID NO: 201 - RNA, 20 nt, synthetic construct
  source 1..20: mol_type = other RNA; note = Description of Artificial Sequence: Synthetic oligonucleotide
gcaattcagtctcgttgtgc

SEQ ID NO: 202 - RNA, 20 nt, synthetic construct
  source 1..20: mol_type = other RNA; note = Description of Artificial Sequence: Synthetic oligonucleotide
caattcagtctcgttgtgcc

SEQ ID NO: 203 - RNA, 22 nt, synthetic construct
  source 1..22: mol_type = other RNA; note = Description of Artificial Sequence: Synthetic oligonucleotide
ccacaatgttgtgactgggcct

SEQ ID NO: 204 - RNA, 20 nt, synthetic construct
  source 1..20: mol_type = other RNA; note = Description of Artificial Sequence: Synthetic oligonucleotide
ccacaatgttgtgactgggc

SEQ ID NO: 205 - RNA, 20 nt, synthetic construct
  source 1..20: mol_type = other RNA; note = Description of Artificial Sequence: Synthetic oligonucleotide
cacaatgttgtgactgggcc

SEQ ID NO: 206 - RNA, 22 nt, synthetic construct
  source 1..22: mol_type = other RNA; note = Description of Artificial Sequence: Synthetic oligonucleotide
tgaacctcttgttataaagcct

SEQ ID NO: 207 - RNA, 20 nt, synthetic construct
  source 1..20: mol_type = other RNA; note = Description of Artificial Sequence: Synthetic oligonucleotide
tgaacctcttgttataaagc

SEQ ID NO: 208 - RNA, 20 nt, synthetic construct
  source 1..20: mol_type = other RNA; note = Description of Artificial Sequence: Synthetic oligonucleotide
gaacctcttgttataaagcc

SEQ ID NO: 209 - RNA, 22 nt, synthetic construct
  source 1..22: mol_type = other RNA; note = Description of Artificial Sequence: Synthetic oligonucleotide
cctgctagctccatgcttgcct

SEQ ID NO: 210 - RNA, 20 nt, synthetic construct
  source 1..20: mol_type = other RNA; note = Description of Artificial Sequence: Synthetic oligonucleotide
cctgctagctccatgcttgc

SEQ ID NO: 211 - RNA, 19 nt, synthetic construct
  source 1..19: mol_type = other RNA; note = Description of Artificial Sequence: Synthetic oligonucleotide
cctgctagctccatgcttg

SEQ ID NO: 212 - RNA, 20 nt, synthetic construct
  source 1..20: mol_type = other RNA; note = Description of Artificial Sequence: Synthetic oligonucleotide
ctgctagctccatgcttgcc

SEQ ID NO: 213 - RNA, 22 nt, synthetic construct
  source 1..22: mol_type = other RNA; note = Description of Artificial Sequence: Synthetic oligonucleotide
ccgacaaccagtatttgggcct

SEQ ID NO: 214 - RNA, 20 nt, synthetic construct
  source 1..20: mol_type = other RNA; note = Description of Artificial Sequence: Synthetic oligonucleotide
ccgacaaccagtatttgggc

SEQ ID NO: 215 - RNA, 19 nt, synthetic construct
  source 1..19: mol_type = other RNA; note = Description of Artificial Sequence: Synthetic oligonucleotide
ccgacaaccagtatttggg

SEQ ID NO: 216 - RNA, 20 nt, synthetic construct
  source 1..20: mol_type = other RNA; note = Description of Artificial Sequence: Synthetic oligonucleotide
cgacaaccagtatttgggcc

SEQ ID NO: 217 - RNA, 19 nt, synthetic construct
  source 1..19: mol_type = other RNA; note = Description of Artificial Sequence: Synthetic oligonucleotide
cgacaaccagtatttgggc

SEQ ID NO: 218 - RNA, 22 nt, synthetic construct
  source 1..22: mol_type = other RNA; note = Description of Artificial Sequence: Synthetic oligonucleotide
gcaattcagtctcgttgtacct

SEQ ID NO: 219 - RNA, 20 nt, synthetic construct
  source 1..20: mol_type = other RNA; note = Description of Artificial Sequence: Synthetic oligonucleotide
gcaattcagtctcgttgtac

SEQ ID NO: 220 - RNA, 19 nt, synthetic construct
  source 1..19: mol_type = other RNA; note = Description of Artificial Sequence: Synthetic oligonucleotide
gcaattcagtctcgttgta

SEQ ID NO: 221 - RNA, 20 nt, synthetic construct
  source 1..20: mol_type = other RNA; note = Description of Artificial Sequence: Synthetic oligonucleotide
caattcagtctcgttgtacc

SEQ ID NO: 222 - RNA, 22 nt, synthetic construct
  source 1..22: mol_type = other RNA; note = Description of Artificial Sequence: Synthetic oligonucleotide
gcaattcagactcgttgtacct

SEQ ID NO: 223 - RNA, 20 nt, synthetic construct
  source 1..20: mol_type = other RNA; note = Description of Artificial Sequence: Synthetic oligonucleotide
gcaattcagactcgttgtac

SEQ ID NO: 224 - RNA, 19 nt, synthetic construct
  source 1..19: mol_type = other RNA; note = Description of Artificial Sequence: Synthetic oligonucleotide
gcaattcagactcgttgta

SEQ ID NO: 225 - RNA, 20 nt, synthetic construct
  source 1..20: mol_type = other RNA; note = Description of Artificial Sequence: Synthetic oligonucleotide
caattcagactcgttgtacc

SEQ ID NO: 226 - RNA, 22 nt, synthetic construct
  source 1..22: mol_type = other RNA; note = Description of Artificial Sequence: Synthetic oligonucleotide
agcaattcagtctcgttgtacc

SEQ ID NO: 227 - RNA, 21 nt, synthetic construct
  source 1..21: mol_type = other RNA; note = Description of Artificial Sequence: Synthetic oligonucleotide
agcaattcagtctcgttgtac

SEQ ID NO: 228 - RNA, 21 nt, synthetic construct
  source 1..21: mol_type = other RNA; note = Description of Artificial Sequence: Synthetic oligonucleotide
aggtttatgaactgacgttac

SEQ ID NO: 229 - RNA, 22 nt, synthetic construct
  source 1..22: mol_type = other RNA; note = Description of Artificial Sequence: Synthetic oligonucleotide
aggtttatgaactgacgttacc

SEQ ID NO: 230 - RNA, 21 nt, synthetic construct
  source 1..21: mol_type = other RNA; note = Description of Artificial Sequence: Synthetic oligonucleotide
accacaatgttgtgactggac

SEQ ID NO: 231 - RNA, 22 nt, synthetic construct
  source 1..22: mol_type = other RNA; note = Description of Artificial Sequence: Synthetic oligonucleotide
accacaatgttgtgactggacc

SEQ ID NO: 232 - RNA, 23 nt, synthetic construct
  source 1..23: mol_type = other RNA; note = Description of Artificial Sequence: Synthetic oligonucleotide
ccacaatgttgtgactggaccgt

SEQ ID NO: 233 - RNA, 22 nt, synthetic construct
  source 1..22: mol_type = other RNA; note = Description of Artificial Sequence: Synthetic oligonucleotide
ccacaatgttgtgactggaccg

SEQ ID NO: 234 - RNA, 20 nt, synthetic construct
  source 1..20: mol_type = other RNA; note = Description of Artificial Sequence: Synthetic oligonucleotide
ccacaatgttgtgactggac

SEQ ID NO: 235 - RNA, 20 nt, synthetic construct
  source 1..20: mol_type = other RNA; note = Description of Artificial Sequence: Synthetic oligonucleotide
cacaatgttgtgactggacc

SEQ ID NO: 236 - RNA, 22 nt, synthetic construct
  source 1..22: mol_type = other RNA; note = Description of Artificial Sequence: Synthetic oligonucleotide
acctgctagctccatgcttccc

SEQ ID NO: 237 - RNA, 21 nt, synthetic construct
  source 1..21: mol_type = other RNA; note = Description of Artificial Sequence: Synthetic oligonucleotide
acctgctagctccatgcttcc

SEQ ID NO: 238 - RNA, 20 nt, synthetic construct
  source 1..20: mol_type = other RNA; note = Description of Artificial Sequence: Synthetic oligonucleotide
acctgctagctccatgcttc

SEQ ID NO: 239 - RNA, 20 nt, synthetic construct
  source 1..20: mol_type = other RNA; note = Description of Artificial Sequence: Synthetic oligonucleotide
cctgctagctccatgcttcc

SEQ ID NO: 240 - RNA, 19 nt, synthetic construct
  source 1..19: mol_type = other RNA; note = Description of Artificial Sequence: Synthetic oligonucleotide
cctgctagctccatgcttc

SEQ ID NO: 241 - RNA, 20 nt, synthetic construct
  source 1..20: mol_type = other RNA; note = Description of Artificial Sequence: Synthetic oligonucleotide
ctgctagctccatgcttccc

SEQ ID NO: 242 - RNA, 19 nt, synthetic construct
  source 1..19: mol_type = other RNA; note = Description of Artificial Sequence: Synthetic oligonucleotide
ctgctagctccatgcttcc

SEQ ID NO: 243 - RNA, 22 nt, synthetic construct
  source 1..22: mol_type = other RNA; note = Description of Artificial Sequence: Synthetic oligonucleotide
accgacaaccagtatttggacc

SEQ ID NO: 244 - RNA, 21 nt, synthetic construct
  source 1..21: mol_type = other RNA; note = Description of Artificial Sequence: Synthetic oligonucleotide
accgacaaccagtatttggac

SEQ ID NO: 245 - RNA, 23 nt, synthetic construct
  source 1..23: mol_type = other RNA; note = Description of Artificial Sequence: Synthetic oligonucleotide
ccgacaaccagtatttggaccgt

SEQ ID NO: 246 - RNA, 23 nt, synthetic construct
  source 1..23: mol_type = other RNA; note = Description of Artificial Sequence: Synthetic oligonucleotide
ccgacaaccagtatttggaccgt

SEQ ID NO: 247 - RNA, 20 nt, synthetic construct
  source 1..20: mol_type = other RNA; note = Description of Artificial Sequence: Synthetic oligonucleotide
ccgacaaccagtatttggac

SEQ ID NO: 248 - RNA, 20 nt, synthetic construct
  source 1..20: mol_type = other RNA; note = Description of Artificial Sequence: Synthetic oligonucleotide
cgacaaccagtatttggacc

SEQ ID NO: 249 - RNA, 21 nt, synthetic construct
  source 1..21: mol_type = other RNA; note = Description of Artificial Sequence: Synthetic oligonucleotide
cctgctagcaccgtgcttacc

SEQ ID NO: 250 - RNA, 54 nt, synthetic construct
  source 1..54: mol_type = other RNA; note = Description of Artificial Sequence: Synthetic oligonucleotide
gtgctgggcggggggcggcgggccctcccgcagaacaccatgcgctcttcggaa

SEQ ID NO: 251 - RNA, 100 nt, synthetic construct
  source 1..100: mol_type = other RNA; note = Description of Artificial Sequence: Synthetic polynucleotide
gaagcaaagaaggggcagagggagcccgtgagctgagtgggccagggactgggagaaggagtgaggaggcagggccggcatgcctctgctgctggccaga

SEQ ID NO: 252 - RNA, 54 nt, synthetic construct
  source 1..54: mol_type = other RNA; note = Description of Artificial Sequence: Synthetic oligonucleotide
gtgctgggcggggggcggcgggccctcccgcagaacaccatgcgctccacggaa

SEQ ID NO: 253 - RNA, 35 nt, synthetic construct
  source 1..35: mol_type = other RNA; note = Description of Artificial Sequence: Synthetic oligonucleotide
gggccctcccgcagaacaccatgcgctccacggaa

SEQ ID NO: 254 - RNA, 30 nt, synthetic construct
  source 1..30: mol_type = other RNA; note = Description of Artificial Sequence: Synthetic oligonucleotide
ctcccgcagaacaccatgcgctccacggaa

SEQ ID NO: 255 - RNA, 55 nt, synthetic construct
  source 1..55: mol_type = other RNA; note = Description of Artificial Sequence: Synthetic oligonucleotide
gtgctgggcggggggcggcgggccctcccgcagaacaccatgcgctccacggaag

SEQ ID NO: 256 - RNA, 54 nt, synthetic construct
  source 1..54: mol_type = other RNA; note = Description of Artificial Sequence: Synthetic oligonucleotide
gtgctgggcggggggcggcgggccctcccgcagaacaccatgcgctcctcggaa

SEQ ID NO: 257 - RNA, 10 nt, synthetic construct
  source 1..10: mol_type = other RNA; note = Description of Artificial Sequence: Synthetic oligonucleotide
tgtgacctgg

SEQ ID NO: 258 - RNA, 10 nt, synthetic construct
  source 1..10: mol_type = other RNA; note = Description of Artificial Sequence: Synthetic oligonucleotide
tgtgatttgg

SEQ ID NO: 259 - RNA, 18 nt, synthetic construct
  source 1..18: mol_type = other RNA; note = Description of Artificial Sequence: Synthetic oligonucleotide
gtctgcacctgtcactag

SEQ ID NO: 260 - RNA, 10 nt, synthetic construct
  source 1..10: mol_type = other RNA; note = Description of Artificial Sequence: Synthetic oligonucleotide
gtgacccaag

SEQ ID NO: 261 - RNA, 15 nt, synthetic construct
  source 1..15: mol_type = other RNA; note = Description of Artificial Sequence: Synthetic oligonucleotide
gtggccactgagaag

SEQ ID NO: 262 - RNA, 10 nt, synthetic construct
  source 1..10: mol_type = other RNA; note = Description of Artificial Sequence: Synthetic oligonucleotide
gtgacccaat

SEQ ID NO: 263 - RNA, 10 nt, synthetic construct
  source 1..10: mol_type = other RNA; note = Description of Artificial Sequence: Synthetic oligonucleotide
gtgacccaac

SEQ ID NO: 264 - RNA, 15 nt, synthetic construct
  source 1..15: mol_type = other RNA; note = Description of Artificial Sequence: Synthetic oligonucleotide
gtggccactgagaaa

SEQ ID NO: 265 - RNA, 52 nt, synthetic construct
  source 1..52: mol_type = other RNA; note = Description of Artificial Sequence: Synthetic oligonucleotide
ctgaggagcgccttgacagcagccatgggagggccgccccctacctcagtga

SEQ ID NO: 266 - RNA, 52 nt, synthetic construct
  source 1..52: mol_type = other RNA; note = Description of Artificial Sequence: Synthetic oligonucleotide
ctgtggagcgccttgacagcagccatgggagggccgccccctacctcagtga

SEQ ID NO: 267 - RNA, 100 nt, synthetic construct
  source 1..100: mol_type = other RNA; note = Description of Artificial Sequence: Synthetic polynucleotide
tggccgtgtagtgctacccagcgctggctgcctcctcagcattgcaattcctctcccatctgggcaccagtcagctaccctggtgggaatctgggtagcc

SEQ ID NO: 268 - RNA, 35 nt, synthetic construct
  source 1..35: mol_type = other RNA; note = Description of Artificial Sequence: Synthetic oligonucleotide
ctgaggagcgccttgacagcagccatgggagggcc

SEQ ID NO: 269 - RNA, 52 nt, synthetic construct
  source 1..52: mol_type = other RNA; note = Description of Artificial Sequence: Synthetic oligonucleotide
ctgcggagcgccttgacagcagccatgggagggccgccccctacctcagtga

SEQ ID NO: 270 - RNA, 158 nt, synthetic construct
  source 1..158: mol_type = other RNA; note = Description of Artificial Sequence: Synthetic polynucleotide
gtgctgggcggggggcggcgggccctcccgcagaacaccatgcgctcttcggaatccaggtttatgaactgaccctgtgacctggttcagttcataaacctggattctgaggagcgccttgacagcagccatgggagggccgccccctacctcagtga

SEQ ID NO: 271 - RNA, 158 nt, synthetic construct
  source 1..158: mol_type = other RNA; note = Description of Artificial Sequence: Synthetic polynucleotide
gtgctgggcggggggcggcgggccctcccgcagaacaccatgcgctcttcggaatccaggtttatgaactgagcctgtgacctggttcagttcataaacctggattctgaggagcgccttgacagcagccatgggagggccgccccctacctcagtga

SEQ ID NO: 272 - RNA, 158 nt, synthetic construct
  source 1..158: mol_type = other RNA; note = Description of Artificial Sequence: Synthetic polynucleotide
gtgctgggcggggggcggcgggccctcccgcagaacaccatgcgctcttcggaatccaggtttatgaactgaacctgtgatttggttcagttcataaacctggattctgaggagcgccttgacagcagccatgggagggccgccccctacctcagtga

SEQ ID NO: 273 - RNA, 158 nt, synthetic construct
  source 1..158: mol_type = other RNA; note = Description of Artificial Sequence: Synthetic polynucleotide
gtgctgggcggggggcggcgggccctcccgcagaacaccatgcgctcttcggaatccaggtttttgaactgaacctgtgacctggttcagttcataaacctggattctgtggagcgccttgacagcagccatgggagggccgccccctacctcagtga

SEQ ID NO: 274 - RNA, 158 nt, synthetic construct
  source 1..158: mol_type = other RNA; note = Description of Artificial Sequence: Synthetic polynucleotide
gtgctgggcggggggcggcgggccctcccgcagaacaccatgcgctcttcggaatccaggtttatgaactgaacctgtgacctggttcagttcataaacctggattctgtggagcgccttgacagcagccatgggagggccgccccctacctcagtga

SEQ ID NO: 275 - RNA, 260 nt, synthetic construct
  source 1..260: mol_type = other RNA; note = Description of Artificial Sequence: Synthetic polynucleotide
gaagcaaagaaggggcagagggagcccgtgagctgagtgggccagggactgggagaaggagtgaggaggcagggccggcatgcctctgctgctggccagatccaggtttatgaactgaaccgtctgcacctgtcactagtgtcggtaccgtctaacactttggccgtgtagtgctacccagcgctggctgcctcctcagcattgcaattcctctcccatctgggcaccagtcagctaccctggtgggaatctgggtagcc

SEQ ID NO: 276 - RNA, 158 nt, synthetic construct
  source 1..158: mol_type = other RNA; note = Description of Artificial Sequence: Synthetic polynucleotide
gtgctgggcggggggcggcgggccctcccgcagaacaccatgcgctcttcggaaggtttatgaactgacgttccctgtgacctggtaacgtcagttcataaaccttctgaggagcgccttgacagcagccatgggagggccgccccctacctcagtga

SEQ ID NO: 277 - RNA, 158 nt, synthetic construct
  source 1..158: mol_type = other RNA; note = Description of Artificial Sequence: Synthetic polynucleotide
gtgctgggcggggggcggcgggccctcccgcagaacaccatgcgctcttcggaaggtttatgaactgacgttgcctgtgacctggtaacgtcagttcataaaccttctgaggagcgccttgacagcagccatgggagggccgccccctacctcagtga

SEQ ID NO: 278 - RNA, 158 nt, synthetic construct
  source 1..158: mol_type = other RNA; note = Description of Artificial Sequence: Synthetic polynucleotide
gtgctgggcggggggcggcgggccctcccgcagaacaccatgcgctcttcggaaggtttatgaactgacgttacctgtgatttggtaacgtcagttcataaaccttctgaggagcgccttgacagcagccatgggagggccgccccctacctcagtga

SEQ ID NO: 279 - RNA, 158 nt, synthetic construct
  source 1..158: mol_type = other RNA; note = Description of Artificial Sequence: Synthetic polynucleotide
gtgctgggcggggggcggcgggccctcccgcagaacaccatgcgctcttcggaaggtttatgatctgacgttacctgtgacctggtaacgtcagttcataaaccttctgtggagcgccttgacagcagccatgggagggccgccccctacctcagtga

SEQ ID NO: 280 - RNA, 158 nt, synthetic construct
  source 1..158: mol_type = other RNA; note = Description of Artificial Sequence: Synthetic polynucleotide
gtgctgggcggggggcggcgggccctcccgcagaacaccatgcgctcttcggaaggtttatgaactgacgttacctgtgacctggtaacgtcagttcataaaccttctgtggagcgccttgacagcagccatgggagggccgccccctacctcagtga

SEQ ID NO: 281 - RNA, 260 nt, synthetic construct
  source 1..260: mol_type = other RNA; note = Description of Artificial Sequence: Synthetic polynucleotide
gaagcaaagaaggggcagagggagcccgtgagctgagtgggccagggactgggagaaggagtgaggaggcagggccggcatgcctctgctgctggccagaggtttatgaactgacgttaccgtctgcacctgtcactagtaacgtcagttcataaacctttggccgtgtagtgctacccagcgctggctgcctcctcagcattgcaattcctctcccatctgggcaccagtcagctaccctggtgggaatctgggtagcc

SEQ ID NO: 282 - RNA, 158 nt, synthetic construct
  source 1..158: mol_type = other RNA; note = Description of Artificial Sequence: Synthetic polynucleotide
gtgctgggcggggggcggcgggccctcccgcagaacaccatgcgctcttcggaagtttatgaactgatcttaccctgtgacctggttaacgtcagttcataaacttctgaggagcgccttgacagcagccatgggagggccgccccctacctcagtga

SEQ ID NO: 283 - RNA, 158 nt, synthetic construct
  source 1..158: mol_type = other RNA; note = Description of Artificial Sequence: Synthetic polynucleotide
gtgctgggcggggggcggcgggccctcccgcagaacaccatgcgctcttcggaagtttatgaactgatcttagcctgtgacctggttaacgtcagttcataaacttctgaggagcgccttgacagcagccatgggagggccgccccctacctcagtga

SEQ ID NO: 284 - RNA, 158 nt, synthetic construct
  source 1..158: mol_type = other RNA; note = Description of Artificial Sequence: Synthetic polynucleotide
gtgctgggcggggggcggcgggccctcccgcagaacaccatgcgctcttcggaagtttatgaactgatcttaccctgtgatttggttaacgtcagttcataaacttctgaggagcgccttgacagcagccatgggagggccgccccctacctcagtga

SEQ ID NO: 285 - RNA, 158 nt, synthetic construct
  source 1..158: mol_type = other RNA; note = Description of Artificial Sequence: Synthetic polynucleotide
gtgctgggcggggggcggcgggccctcccgcagaacaccatgcgctcttcggaagtttatgaagtgatcttaacctgtgacctggttaacgtcagttcataaacttctgtggagcgccttgacagcagccatgggagggccgccccctacctcagtga

SEQ ID NO: 286 - RNA, 158 nt, synthetic construct
  source 1..158: mol_type = other RNA; note = Description of Artificial Sequence: Synthetic polynucleotide
gtgctgggcggggggcggcgggccctcccgcagaacaccatgcgctcttcggaagtttatgaactgatcttaacctgtgacctggttaacgtcagttcataaacttctgtggagcgccttgacagcagccatgggagggccgccccctacctcagtga

SEQ ID NO: 287 - RNA, 260 nt, synthetic construct
  source 1..260: mol_type = other RNA; note = Description of Artificial Sequence: Synthetic polynucleotide
gaagcaaagaaggggcagagggagcccgtgagctgagtgggccagggactgggagaaggagtgaggaggcagggccggcatgcctctgctgctggccagagtttatgaactgatcttacccgtctgcacctgtcactagttaacgtcagttcataaactttggccgtgtagtgctacccagcgctggctgcctcctcagcattgcaattcctctcccatctgggcaccagtcagctaccctggtgggaatctgggtagcc

SEQ ID NO: 288 - RNA, 158 nt, synthetic construct
  source 1..158: mol_type = other RNA; note = Description of Artificial Sequence: Synthetic polynucleotide
gtgctgggcggggggcggcgggccctcccgcagaacaccatgcgctcttcggaagtttatgaactgatcttgccctgtgacctggttaacgtcagttcataaacttctgaggagcgccttgacagcagccatgggagggccgccccctacctcagtga

SEQ ID NO: 289 - RNA, 158 nt, synthetic construct
  source 1..158: mol_type = other RNA; note = Description of Artificial Sequence: Synthetic polynucleotide
gtgctgggcggggggcggcgggccctcccgcagaacaccatgcgctcttcggaagtttatgaactgatcttggcctgtgacctggttaacgtcagttcataaacttctgaggagcgccttgacagcagccatgggagggccgccccctacctcagtga

SEQ ID NO: 290 - RNA, 158 nt, synthetic construct
  source 1..158: mol_type = other RNA; note = Description of Artificial Sequence: Synthetic polynucleotide
gtgctgggcggggggcggcgggccctcccgcagaacaccatgcgctcttcggaagtttatgaactgatcttgccctgtgatttggttaacgtcagttcataaacttctgaggagcgccttgacagcagccatgggagggccgccccctacctcagtga

SEQ ID NO: 291 - RNA, 158 nt, synthetic construct
  source 1..158: mol_type = other RNA; note = Description of Artificial Sequence: Synthetic polynucleotide
gtgctgggcggggggcggcgggccctcccgcagaacaccatgcgctcttcggaagtttatgaactgatcttgacctgtgacctggttaacgtcagttcataaacttctgtggagcgccttgacagcagccatgggagggccgccccctacctcagtga

SEQ ID NO: 292 - RNA, 260 nt, synthetic construct
  source 1..260: mol_type = other RNA; note = Description of Artificial Sequence: Synthetic polynucleotide
gaagcaaagaaggggcagagggagcccgtgagctgagtgggccagggactgggagaaggagtgaggaggcagggccggcatgcctctgctgctggccagagtttatgaactgatcttgcccgtctgcacctgtcactagttaacgtcagttcataaactttggccgtgtagtgctacccagcgctggctgcctcctcagcattgcaattcctctcccatctgggcaccagtcagctaccctggtgggaatctgggtagcc

SEQ ID NO: 293 - RNA, 158 nt, synthetic construct
  source 1..158: mol_type = other RNA; note = Description of Artificial Sequence: Synthetic polynucleotide
gtgctgggcggggggcggcgggccctcccgcagaacaccatgcgctcttcggaaccacaatgttgtgactggccctgtgacctggtccggtcacaacattgtggttctgaggagcgccttgacagcagccatgggagggccgccccctacctcagtga

SEQ ID NO: 294 - RNA, 158 nt, synthetic construct
  source 1..158: mol_type = other RNA; note = Description of Artificial Sequence: Synthetic polynucleotide
gtgctgggcggggggcggcgggccctcccgcagaacaccatgcgctcttcggaaccacaatgttgtgactgggcctgtgacctggtccggtcacaacattgtggttctgaggagcgccttgacagcagccatgggagggccgccccctacctcagtga

SEQ ID NO: 295 - RNA, 158 nt, synthetic construct
  source 1..158: mol_type = other RNA; note = Description of Artificial Sequence: Synthetic polynucleotide
gtgctgggcggggggcggcgggccctcccgcagaacaccatgcgctcttcggaaccacaatgttgtgactggacctgtgatttggtccggtcacaacattgtggttctgaggagcgccttgacagcagccatgggagggccgccccctacctcagtga

SEQ ID NO: 296 - RNA, 158 nt, synthetic construct
  source 1..158: mol_type = other RNA; note = Description of Artificial Sequence: Synthetic polynucleotide
gtgctgggcggggggcggcgggccctcccgcagaacaccatgcgctcttcggaaccacaatgtagtgactggacctgtgacctggtccggtcacaacattgtggttctgtggagcgccttgacagcagccatgggagggccgccccctacctcagtga

SEQ ID NO: 297 - RNA, 158 nt, synthetic construct
  source 1..158: mol_type = other RNA; note = Description of Artificial Sequence: Synthetic polynucleotide
gtgctgggcggggggcggcgggccctcccgcagaacaccatgcgctcttcggaaccacaatgttgtgactggacctgtgacctggtccggtcacaacattgtggttctgtggagcgccttgacagcagccatgggagggccgccccctacctcagtga

SEQ ID NO: 298 - RNA, 260 nt, synthetic construct
  source 1..260: mol_type = other RNA; note = Description of Artificial Sequence: Synthetic polynucleotide
gaagcaaagaaggggcagagggagcccgtgagctgagtgggccagggactgggagaaggagtgaggaggcagggccggcatgcctctgctgctggccagaccacaatgttgtgactggaccgtctgcacctgtcactagtccggtcacaacattgtggtttggccgtgtagtgctacccagcgctggctgcctcctcagcattgcaattcctctcccatctgggcaccagtcagctaccctggtgggaatctgggtagcc

SEQ ID NO: 299 - RNA, 158 nt, synthetic construct
  source 1..158: mol_type = other RNA; note = Description of Artificial Sequence: Synthetic polynucleotide
gtgctgggcggggggcggcgggccctcccgcagaacaccatgcgctcttcggaagtgttagacggtactgatccctgtgacctggtgtcggtaccgtctaacacttctgaggagcgccttgacagcagccatgggagggccgccccctacctcagtga

SEQ ID NO: 300 - RNA, 158 nt, synthetic construct
  source 1..158: mol_type = other RNA; note = Description of Artificial Sequence: Synthetic polynucleotide
gtgctgggcggggggcggcgggccctcccgcagaacaccatgcgctcttcggaagtgttagacggtactgatgcctgtgacctggtgtcggtaccgtctaacacttctgaggagcgccttgacagcagccatgggagggccgccccctacctcagtga

SEQ ID NO: 301 - RNA, 158 nt, synthetic construct
  source 1..158: mol_type = other RNA; note = Description of Artificial Sequence: Synthetic polynucleotide
gtgctgggcggggggcggcgggccctcccgcagaacaccatgcgctcttcggaagtgttagacggtactgatccctgtgatttggtgtcggtaccgtctaacacttctgaggagcgccttgacagcagccatgggagggccgccccctacctcagtga

SEQ ID NO: 302 - RNA, 158 nt, synthetic construct
  source 1..158: mol_type = other RNA; note = Description of Artificial Sequence: Synthetic polynucleotide
gtgctgggcggggggcggcgggccctcccgcagaacaccatgcgctcttcggaagtgttagaccgtactgatacctgtgacctggtgtcggtaccgtctaacacttctgtggagcgccttgacagcagccatgggagggccgccccctacctcagtga

SEQ ID NO: 303 - RNA, 158 nt, synthetic construct
  source 1..158: mol_type = other RNA; note = Description of Artificial Sequence: Synthetic polynucleotide
gtgctgggcggggggcggcgggccctcccgcagaacaccatgcgctcttcggaagtgttagacggtactgatacctgtgacctggtgtcggtaccgtctaacacttctgtggagcgccttgacagcagccatgggagggccgccccctacctcagtga

SEQ ID NO: 304 - RNA, 260 nt, synthetic construct
  source 1..260: mol_type = other RNA; note = Description of Artificial Sequence: Synthetic polynucleotide
gaagcaaagaaggggcagagggagcccgtgagctgagtgggccagggactgggagaaggagtgaggaggcagggccggcatgcctctgctgctggccagagtgttagacggtactgatcccgtctgcacctgtcactagtgtcggtaccgtctaacactttggccgtgtagtgctacccagcgctggctgcctcctcagcattgcaattcctctcccatctgggcaccagtcagctaccctggtgggaatctgggtagcc

SEQ ID NO: 305 - RNA, 158 nt, synthetic construct
  source 1..158: mol_type = other RNA; note = Description of Artificial Sequence: Synthetic polynucleotide
gtgctgggcggggggcggcgggccctcccgcagaacaccatgcgctcttcggaaccgacaaccagtatttggccctgtgacctggtccaaatactggttgtcggttctgaggagcgccttgacagcagccatgggagggccgccccctacctcagtga

SEQ ID NO: 306 - RNA, 158 nt, synthetic construct
  source 1..158: mol_type = other RNA; note = Description of Artificial Sequence: Synthetic polynucleotide
gtgctgggcggggggcggcgggccctcccgcagaacaccatgcgctcttcggaaccgacaaccagtatttgggcctgtgacctggtccaaatactggttgtcggttctgaggagcgccttgacagcagccatgggagggccgccccctacctcagtga

SEQ ID NO: 307 - RNA, 158 nt, synthetic construct
  source 1..158: mol_type = other RNA; note = Description of Artificial Sequence: Synthetic polynucleotide
gtgctgggcggggggcggcgggccctcccgcagaacaccatgcgctcttcggaaccgacaaccagtatttggacctgtgatttggtccaaatactggttgtcggttctgaggagcgccttgacagcagccatgggagggccgccccctacctcagtga

SEQ ID NO: 308 - RNA, 158 nt, synthetic construct
  source 1..158: mol_type = other RNA; note = Description of Artificial Sequence: Synthetic polynucleotide
gtgctgggcggggggcggcgggccctcccgcagaacaccatgcgctcttcggaaccgacaacctgtatttggacctgtgacctggtccaaatactggttgtcggttctgtggagcgccttgacagcagccatgggagggccgccccctacctcagtga

SEQ ID NO: 309 - RNA, 158 nt, synthetic construct
  source 1..158: mol_type = other RNA; note = Description of Artificial Sequence: Synthetic polynucleotide
gtgctgggcggggggcggcgggccctcccgcagaacaccatgcgctcttcggaaccgacaaccagtatttggacctgtgacctggtccaaatactggttgtcggttctgtggagcgccttgacagcagccatgggagggccgccccctacctcagtga

SEQ ID NO: 310 - RNA, 260 nt, synthetic construct
  source 1..260: mol_type = other RNA; note = Description of Artificial Sequence: Synthetic polynucleotide
gaagcaaagaaggggcagagggagcccgtgagctgagtgggccagggactgggagaaggagtgaggaggcagggccggcatgcctctgctgctggccagaccgacaaccagtatttggaccgtctgcacctgtcactagtccaaatactggttgtcggtttggccgtgtagtgctacccagcgctggctgcctcctcagcattgcaattcctctcccatctgggcaccagtcagctaccctggtgggaatctgggtagcc

SEQ ID NO: 311 - RNA, 158 nt, synthetic construct
  source 1..158: mol_type = other RNA; note = Description of Artificial Sequence: Synthetic polynucleotide
gtgctgggcggggggcggcgggccctcccgcagaacaccatgcgctcttcggaagtcacaaagaaccgtgtaccctgtgacctggttgcacggttctttgtgacttctgaggagcgccttgacagcagccatgggagggccgccccctacctcagtga

SEQ ID NO: 312 - RNA, 158 nt, synthetic construct
  source 1..158: mol_type = other RNA; note = Description of Artificial Sequence: Synthetic polynucleotide
gtgctgggcggggggcggcgggccctcccgcagaacaccatgcgctcttcggaagtcacaaagaaccgtgtagcctgtgacctggttgcacggttctttgtgacttctgaggagcgccttgacagcagccatgggagggccgccccctacctcagtga

SEQ ID NO: 313 - RNA, 158 nt, synthetic construct
  source 1..158: mol_type = other RNA; note = Description of Artificial Sequence: Synthetic polynucleotide
gtgctgggcggggggcggcgggccctcccgcagaacaccatgcgctcttcggaagtcacaaagaaccgtgtaacctgtgatttggttgcacggttctttgtgacttctgaggagcgccttgacagcagccatgggagggccgccccctacctcagtga

SEQ ID NO: 314 - RNA, 158 nt, synthetic construct
  source 1..158: mol_type = other RNA; note = Description of Artificial Sequence: Synthetic polynucleotide
gtgctgggcggggggcggcgggccctcccgcagaacaccatgcgctcttcggaagtcacaaagtaccgtgtaacctgtgacctggttgcacggttctttgtgacttctgtggagcgccttgacagcagccatgggagggccgccccctacctcagtga

SEQ ID NO: 315 - RNA, 158 nt, synthetic construct
  source 1..158: mol_type = other RNA; note = Description of Artificial Sequence: Synthetic polynucleotide
gtgctgggcggggggcggcgggccctcccgcagaacaccatgcgctcttcggaagtcacaaagaaccgtgtaacctgtgacctggttgcacggttctttgtgacttctgtggagcgccttgacagcagccatgggagggccgccccctacctcagtga

SEQ ID NO: 316 - RNA, 260 nt, synthetic construct
  source 1..260: mol_type = other RNA; note = Description of Artificial Sequence: Synthetic polynucleotide
gaagcaaagaaggggcagagggagcccgtgagctgagtgggccagggactgggagaaggagtgaggaggcagggccggcatgcctctgctgctggccagagtcacaaagaaccgtgtaaccgtctgcacctgtcactagttgcacggttctttgtgactttggccgtgtagtgctacccagcgctggctgcctcctcagcattgcaattcctctcccatctgggcaccagtcagctaccctggtgggaatctgggtagcc

SEQ ID NO: 317 - RNA, 158 nt, synthetic construct
  source 1..158: mol_type = other RNA; note = Description of Artificial Sequence: Synthetic polynucleotide
gtgctgggcggggggcggcgggccctcccgcagaacaccatgcgctcttcggaatgaacctcttgttataaaccctgtgacctggttttataacaagaggttcattctgaggagcgccttgacagcagccatgggagggccgccccctacctcagtga

SEQ ID NO: 318 - RNA, 158 nt, synthetic construct
  source 1..158: mol_type = other RNA; note = Description of Artificial Sequence: Synthetic polynucleotide
gtgctgggcggggggcggcgggccctcccgcagaacaccatgcgctcttcggaatgaacctcttgttataaagcctgtgacctggttttataacaagaggttcattctgaggagcgccttgacagcagccatgggagggccgccccctacctcagtga

SEQ ID NO: 319 - RNA, 158 nt, synthetic construct
  source 1..158: mol_type = other RNA; note = Description of Artificial Sequence: Synthetic polynucleotide
gtgctgggcggggggcggcgggccctcccgcagaacaccatgcgctcttcggaatgaacctcttgttataaaacctgtgatttggttttataacaagaggttcattctgaggagcgccttgacagcagccatgggagggccgccccctacctcagtga

SEQ ID NO: 320 - RNA, 158 nt, synthetic construct
  source 1..158: mol_type = other RNA; note = Description of Artificial Sequence: Synthetic polynucleotide
gtgctgggcggggggcggcgggccctcccgcagaacaccatgcgctcttcggaatgaacctctagttataaaacctgtgacctggttttataacaagaggttcattctgtggagcgccttgacagcagccatgggagggccgccccctacctcagtga

SEQ ID NO: 321 - RNA, 158 nt, synthetic construct
  source 1..158: mol_type = other RNA; note = Description of Artificial Sequence: Synthetic polynucleotide
gtgctgggcggggggcggcgggccctcccgcagaacaccatgcgctcttcggaatgaacctcttgttataaaacctgtgacctggttttataacaagaggttcattctgtggagcgccttgacagcagccatgggagggccgccccctacctcagtga

SEQ ID NO: 322 - RNA, 260 nt, synthetic construct
  source 1..260: mol_type = other RNA; note = Description of Artificial Sequence: Synthetic polynucleotide
gaagcaaagaaggggcagagggagcccgtgagctgagtgggccagggactgggagaaggagtgaggaggcagggccggcatgcctctgctgctggccagatgaacctcttgttataaaaccgtctgcacctgtcactagttttataacaagaggttcatttggccgtgtagtgctacccagcgctggctgcctcctcagcattgcaattcctctcccatctgggcaccagtcagctaccctggtgggaatctgggtagcc

SEQ ID NO: 323 - RNA, 158 nt, synthetic construct
  source 1..158: mol_type = other RNA; note = Description of Artificial Sequence: Synthetic polynucleotide
gtgctgggcggggggcggcgggccctcccgcagaacaccatgcgctcttcggaagatcattggaattcctaatcctgtgacctggtttaggaattccaatgatcttctgaggagcgccttgacagcagccatgggagggccgccccctacctcagtga

SEQ ID NO: 324 - RNA, 158 nt, synthetic construct
  source 1..158: mol_type = other RNA; note = Description of Artificial Sequence: Synthetic polynucleotide
gtgctgggcggggggcggcgggccctcccgcagaacaccatgcgctcttcggaagatcattggaattcctaagcctgtgacctggtttaggaattccaatgatcttctgaggagcgccttgacagcagccatgggagggccgccccctacctcagtga

SEQ ID NO: 325 - RNA, 158 nt, synthetic construct
  source 1..158: mol_type = other RNA; note = Description of Artificial Sequence: Synthetic polynucleotide
gtgctgggcggggggcggcgggccctcccgcagaacaccatgcgctcttcggaagatcattggaattcctaaacctgtgatttggtttaggaattccaatgatcttctgaggagcgccttgacagcagccatgggagggccgccccctacctcagtga

SEQ ID NO: 326 - RNA, 158 nt, synthetic construct
  source 1..158: mol_type = other RNA; note = Description of Artificial Sequence: Synthetic polynucleotide
gtgctgggcggggggcggcgggccctcccgcagaacaccatgcgctcttcggaagatcattggtattcctaaacctgtgacctggtttaggaattccaatgatcttctgtggagcgccttgacagcagccatgggagggccgccccctacctcagtga

SEQ ID NO: 327 - RNA, 158 nt, synthetic construct
  source 1..158: mol_type = other RNA; note = Description of Artificial Sequence: Synthetic polynucleotide
gtgctgggcggggggcggcgggccctcccgcagaacaccatgcgctcttcggaagatcattggaattcctaaacctgtgacctggtttaggaattccaatgatcttctgtggagcgccttgacagcagccatgggagggccgccccctacctcagtga

SEQ ID NO: 328 - RNA, 260 nt, synthetic construct
  source 1..260: mol_type = other RNA; note = Description of Artificial Sequence: Synthetic polynucleotide
gaagcaaagaaggggcagagggagcccgtgagctgagtgggccagggactgggagaaggagtgaggaggcagggccggcatgcctctgctgctggccagagatcattggaattcctaaaccgtctgcacctgtcactagtttaggaattccaatgatctttggccgtgtagtgctacccagcgctggctgcctcctcagcattgcaattcctctcccatctgggcaccagtcagctaccctggtgggaatctgggtagcc

SEQ ID NO: 329 - RNA, 158 nt, synthetic construct
  source 1..158: mol_type = other RNA; note = Description of Artificial Sequence: Synthetic polynucleotide
gtgctgggcggggggcggcgggccctcccgcagaacaccatgcgctcttcggaacattggaattcctaaaattcctgtgacctggtattttaggaattccaatgttctgaggagcgccttgacagcagccatgggagggccgccccctacctcagtga

SEQ ID NO: 330 - RNA, 158 nt, synthetic construct
  source 1..158: mol_type = other RNA; note = Description of Artificial Sequence: Synthetic polynucleotide
gtgctgggcggggggcggcgggccctcccgcagaacaccatgcgctcttcggaacattggaattcctaaaatgcctgtgacctggtattttaggaattccaatgttctgaggagcgccttgacagcagccatgggagggccgccccctacctcagtga

SEQ ID NO: 331 - RNA, 158 nt, synthetic construct
  source 1..158: mol_type = other RNA; note = Description of Artificial Sequence: Synthetic polynucleotide
gtgctgggcggggggcggcgggccctcccgcagaacaccatgcgctcttcggaacattggaattcctaaaatacctgtgatttggtattttaggaattccaatgttctgaggagcgccttgacagcagccatgggagggccgccccctacctcagtga

SEQ ID NO: 332 - RNA, 158 nt, synthetic construct
  source 1..158: mol_type = other RNA; note = Description of Artificial Sequence: Synthetic polynucleotide
gtgctgggcggggggcggcgggccctcccgcagaacaccatgcgctcttcggaacattggaatacctaaaatacctgtgacctggtattttaggaattccaatgttctgtggagcgccttgacagcagccatgggagggccgccccctacctcagtga

SEQ ID NO: 333 - RNA, 158 nt, synthetic construct
  source 1..158: mol_type = other RNA; note = Description of Artificial Sequence: Synthetic polynucleotide
gtgctgggcggggggcggcgggccctcccgcagaacaccatgcgctcttcggaacattggaattcctaaaatacctgtgacctggtattttaggaattccaatgttctgtggagcgccttgacagcagccatgggagggccgccccctacctcagtga

SEQ ID NO: 334 - RNA, 260 nt, synthetic construct
  source 1..260: mol_type = other RNA; note = Description of Artificial Sequence: Synthetic polynucleotide
gaagcaaagaaggggcagagggagcccgtgagctgagtgggccagggactgggagaaggagtgaggaggcagggccggcatgcctctgctgctggccagacattggaattcctaaaataccgtctgcacctgtcactagtattttaggaattccaatgtttggccgtgtagtgctacccagcgctggctgcctcctcagcattgcaattcctctcccatctgggcaccagtcagctaccctggtgggaatctgggtagcc

SEQ ID NO: 335 - RNA, 158 nt, synthetic construct
  source 1..158: mol_type = other RNA; note = Description of Artificial Sequence: Synthetic polynucleotide
gtgctgggcggggggcggcgggccctcccgcagaacaccatgcgctcttcggaagcaattcagtctcgttgtccctgtgacctggtacaacgagactgaattgcttctgaggagcgccttgacagcagccatgggagggccgccccctacctcagtga

SEQ ID NO: 336 - RNA, 158 nt, synthetic construct
  source 1..158: mol_type = other RNA; note = Description of Artificial Sequence: Synthetic polynucleotide
gtgctgggcggggggcggcgggccctcccgcagaacaccatgcgctcttcggaagcaattcagtctcgttgtgcctgtgacctggtacaacgagactgaattgcttctgaggagcgccttgacagcagccatgggagggccgccccctacctcagtga

SEQ ID NO: 337 - RNA, 158 nt, synthetic construct
  source 1..158: mol_type = other RNA; note = Description of Artificial Sequence: Synthetic polynucleotide
gtgctgggcggggggcggcgggccctcccgcagaacaccatgcgctcttcggaagcaattcagtctcgttgtacctgtgatttggtacaacgagactgaattgcttctgaggagcgccttgacagcagccatgggagggccgccccctacctcagtga

SEQ ID NO: 338 - RNA, 158 nt, synthetic construct
  source 1..158: mol_type = other RNA; note = Description of Artificial Sequence: Synthetic polynucleotide
gtgctgggcggggggcggcgggccctcccgcagaacaccatgcgctcttcggaagcaattcagactcgttgtacctgtgacctggtacaacgagactgaattgcttctgtggagcgccttgacagcagccatgggagggccgccccctacctcagtga

SEQ ID NO: 339 - RNA, 158 nt, synthetic construct
  source 1..158: mol_type = other RNA; note = Description of Artificial Sequence: Synthetic polynucleotide
gtgctgggcggggggcggcgggccctcccgcagaacaccatgcgctcttcggaagcaattcagtctcgttgtacctgtgacctggtacaacgagactgaattgcttctgtggagcgccttgacagcagccatgggagggccgccccctacctcagtga

SEQ ID NO: 340 - RNA, 260 nt, synthetic construct
  source 1..260: mol_type = other RNA; note = Description of Artificial Sequence: Synthetic polynucleotide
gaagcaaagaaggggcagagggagcccgtgagctgagtgggccagggactgggagaaggagtgaggaggcagggccggcatgcctctgctgctggccagagcaattcagtctcgttgtaccgtctgcacctgtcactagtacaacgagactgaattgctttggccgtgtagtgctacccagcgctggctgcctcctcagcattgcaattcctctcccatctgggcaccagtcagctaccctggtgggaatctgggtagcc

SEQ ID NO: 341 - RNA, 158 nt, synthetic construct
  source 1..158: mol_type = other RNA; note = Description of Artificial Sequence: Synthetic polynucleotide
gtgctgggcggggggcggcgggccctcccgcagaacaccatgcgctcttcggaacctgctagctccatgcttccctgtgacctggtaagcatggagctagcaggttctgaggagcgccttgacagcagccatgggagggccgccccctacctcagtga

SEQ ID NO: 342 - RNA, 158 nt, synthetic construct
  source 1..158: mol_type = other RNA; note = Description of Artificial Sequence: Synthetic polynucleotide
gtgctgggcggggggcggcgggccctcccgcagaacaccatgcgctcttcggaacctgctagctccatgcttgcctgtgacctggtaagcatggagctagcaggttctgaggagcgccttgacagcagccatgggagggccgccccctacctcagtga

SEQ ID NO: 343 - RNA, 158 nt, synthetic construct
  source 1..158: mol_type = other RNA; note = Description of Artificial Sequence: Synthetic polynucleotide
gtgctgggcggggggcggcgggccctcccgcagaacaccatgcgctcttcggaacctgctagctccatgcttccctgtgatttggtaagcatggagctagcaggttctgaggagcgccttgacagcagccatgggagggccgccccctacctcagtga

SEQ ID NO: 344 - RNA, 158 nt, synthetic construct
  source 1..158: mol_type = other RNA; note = Description of Artificial Sequence: Synthetic polynucleotide
gtgctgggcggggggcggcgggccctcccgcagaacaccatgcgctcttcggaacctgctagcaccatgcttacctgtgacctggtaagcatggagctagcaggttctgtggagcgccttgacagcagccatgggagggccgccccctacctcagtga

SEQ ID NO: 345 - RNA, 158 nt, synthetic construct
  source 1..158: mol_type = other RNA; note = Description of Artificial Sequence: Synthetic polynucleotide
gtgctgggcggggggcggcgggccctcccgcagaacaccatgcgctcttcggaacctgctagctccatgcttacctgtgacctggtaagcatggagctagcaggttctgtggagcgccttgacagcagccatgggagggccgccccctacctcagtga

SEQ ID NO: 346 - RNA, 260 nt, synthetic construct
  source 1..260: mol_type = other RNA; note = Description of Artificial Sequence: Synthetic polynucleotide
gaagcaaagaaggggcagagggagcccgtgagctgagtgggccagggactgggagaaggagtgaggaggcagggccggcatgcctctgctgctggccagacctgctagctccatgcttcccgtctgcacctgtcactagtaagcatggagctagcaggtttggccgtgtagtgctacccagcgctggctgcctcctcagcattgcaattcctctcccatctgggcaccagtcagctaccctggtgggaatctgggtagcc

SEQ ID NO: 347 - RNA, 158 nt, synthetic construct
  source 1..158: mol_type = other RNA; note = Description of Artificial Sequence: Synthetic polynucleotide
gtgctgggcggggggcggcgggccctcccgcagaacaccatgcgctcttcggaacctgctagctccatgcttgctgtgacccaagtaagcatggagctagcaggttctgaggagcgccttgacagcagccatgggagggccgccccctacctcagtga

SEQ ID NO: 348 - RNA, 158 nt, synthetic construct
  source 1..158: mol_type = other RNA; note = Description of Artificial Sequence: Synthetic polynucleotide
gtgctgggcggggggcggcgggccctcccgcagaacaccatgcgctccacggaacctgctagctccatgcttgctgtgacccaagtaagcatggagctagcaggttctgaggagcgccttgacagcagccatgggagggccgccccctacctcagtga

SEQ ID NO: 349 - RNA, 163 nt, synthetic construct
  source 1..163: mol_type = other RNA; note = Description of Artificial Sequence: Synthetic polynucleotide
gtgctgggcggggggcggcgggccctcccgcagaacaccatgcgctccacggaacctgctagctccatgcttgctgtggccactgagaagtaagcatggagctagcaggttctgaggagcgccttgacagcagccatgggagggccgccccctacctcagtga

SEQ ID NO: 350 - RNA, 122 nt, synthetic construct
  source 1..122: mol_type = other RNA; note = Description of Artificial Sequence: Synthetic polynucleotide
gggccctcccgcagaacaccatgcgctccacggaacctgctagctccatgcttgctgtgacccaagtaagcatggagctagcaggttctgaggagcgccttgacagcagccatgggagggcc

SEQ ID NO: 351 - RNA, 117 nt, synthetic construct
  source 1..117: mol_type = other RNA; note = Description of Artificial Sequence: Synthetic polynucleotide
ctcccgcagaacaccatgcgctccacggaacctgctagctccatgcttgctgtgacccaagtaagcatggagctagcaggttctgaggagcgccttgacagcagccatgggagggcc

SEQ ID NO: 352 - RNA, 160 nt, synthetic construct
  source 1..160: mol_type = other RNA; note = Description of Artificial Sequence: Synthetic polynucleotide
gtgctgggcggggggcggcgggccctcccgcagaacaccatgcgctccacggaagcctgctagctccatgcttgctgtgacccaagtaagcatggagctagcaggcttctgaggagcgccttgacagcagccatgggagggccgccccctacctcagtga

SEQ ID NO: 353 - RNA, 158 nt, synthetic construct
  source 1..158: mol_type = other RNA; note = Description of Artificial Sequence: Synthetic polynucleotide
gtgctgggcggggggcggcgggccctcccgcagaacaccatgcgctccacggaacctgctagctccatgcttgatgtgacccaattaagcatggagctagcaggttctgaggagcgccttgacagcagccatgggagggccgccccctacctcagtga

SEQ ID NO: 354 - RNA, 158 nt, synthetic construct
  source 1..158: mol_type = other RNA; note = Description of Artificial Sequence: Synthetic polynucleotide
gtgctgggcggggggcggcgggccctcccgcagaacaccatgcgctcctcggaacctgctagctccatgcttgctgtgacccaagtaagcatggagctagcaggttctgcggagcgccttgacagcagccatgggagggccgccccctacctcagtga

SEQ ID NO: 355 - RNA, 158 nt, synthetic construct; identical to SEQ ID NO: 329
  source 1..158: mol_type = other RNA; note = Description of Artificial Sequence: Synthetic polynucleotide

SEQ ID NO: 356 - RNA, 158 nt, synthetic construct; identical to SEQ ID NO: 323
  source 1..158: mol_type = other RNA; note = Description of Artificial Sequence: Synthetic polynucleotide

SEQ ID NO: 357 - RNA, 158 nt, synthetic construct; identical to SEQ ID NO: 330
  source 1..158: mol_type = other RNA; note = Description of Artificial Sequence: Synthetic polynucleotide

SEQ ID NO: 358 - RNA, 158 nt, synthetic construct; identical to SEQ ID NO: 324
  source 1..158: mol_type = other RNA; note = Description of Artificial Sequence: Synthetic polynucleotide

SEQ ID NO: 359 - RNA, 158 nt, synthetic construct; identical to SEQ ID NO: 331
  source 1..158: mol_type = other RNA; note = Description of Artificial Sequence: Synthetic polynucleotide

SEQ ID NO: 360 - RNA, 158 nt, synthetic construct; identical to SEQ ID NO: 325
  source 1..158: mol_type = other RNA; note = Description of Artificial Sequence: Synthetic polynucleotide

SEQ ID NO: 361 - RNA, 158 nt, synthetic construct; identical to SEQ ID NO: 332
  source 1..158: mol_type = other RNA; note = Description of Artificial Sequence: Synthetic polynucleotide

SEQ ID NO: 362 - RNA, 158 nt, synthetic construct; identical to SEQ ID NO: 326
  source 1..158: mol_type = other RNA; note = Description of Artificial Sequence: Synthetic polynucleotide

SEQ ID NO: 363 - RNA, 158 nt, synthetic construct; identical to SEQ ID NO: 333
  source 1..158: mol_type = other RNA; note = Description of Artificial Sequence: Synthetic polynucleotide

SEQ ID NO: 364 - RNA, 158 nt, synthetic construct; identical to SEQ ID NO: 327
  source 1..158: mol_type = other RNA; note = Description of Artificial Sequence: Synthetic polynucleotide

SEQ ID NO: 365 - RNA, 260 nt, synthetic construct; identical to SEQ ID NO: 334
  source 1..260: mol_type = other RNA; note = Description of Artificial Sequence: Synthetic polynucleotide

SEQ ID NO: 366 - RNA, 260 nt, synthetic construct; identical to SEQ ID NO: 328
  source 1..260: mol_type = other RNA; note = Description of Artificial Sequence: Synthetic polynucleotide

SEQ ID NO: 367 - RNA, 158 nt, synthetic construct
  source 1..158: mol_type = other RNA; note = Description of Artificial Sequence: Synthetic polynucleotide
gtgctgggcggggggcggcgggccctcccgcagaacaccatgcgctccacggaataagcatggagctagcagggtgtgacccaaccctgctagctccatgcttattctgaggagcgccttgacagcagccatgggagggccgccccctacctcagtga

SEQ ID NO: 368 - RNA, 163 nt, synthetic construct
  source 1..163: mol_type = other RNA; note = Description of Artificial Sequence: Synthetic polynucleotide
gtgctgggcggggggcggcgggccctcccgcagaacaccatgcgctcctcggaataagcatggagctagcaggttgtggccactgagaaacctgctagctccatgcttgttctgcggagcgccttgacagcagccatgggagggccgccccctacctcagtga

SEQ ID NO: 369 - DNA, 2211 bp, unidentified
  source 1..2211: mol_type = unassigned DNA; note = Adeno-associated virus 1
atggctgccgatggttatcttccagattggctcgaggacaacctctctgagggcattcgcgagtggtgggacttgaaacctggagccccgaagcccaaagccaaccagcaaaagcaggacgacggccggggtctggtgcttcctggctacaagtacctcggacccttcaacggactcgacaagggggagcccgtcaacgcggcggacgcagcggccctcgagcacgacaaggcctacgaccagcagctcaaagcgggtgacaatccgtacctgcggtataaccacgccgacgccgagtttcaggagcgtctgcaagaagatacgtcttttgggggcaacctcgggcgagcagtcttccaggccaagaagcgggttctcgaacctctcggtctggttgaggaaggcgctaagacggctcctggaaagaaacgtccggtagagcagtcgccacaagagccagactcctcctcgggcatcggcaagacaggccagcagcccgctaaaaagagactcaattttggtcagactggcgactcagagtcagtccccgatccacaacctctcggagaacctccagcaacccccgctgctgtgggacctactacaatggcttcaggcggtggcgcaccaatggcagacaataacgaaggcgccgacggagtgggtaatgcctcaggaaattggcattgcgattccacatggctgggcgacagagtcatcaccaccagcacccgcacctgggccttgcccacctacaataaccacctctacaagcaaatctccagtgcttcaacgggggccagcaacgacaaccactacttcggctacagcaccccctgggggtattttgatttcaacagattccactgccacttttcaccacgtgactggcagcgactcatcaacaacaattggggattccggcccaagagactcaacttcaaactcttcaacatccaagtcaaggaggtcacgacgaatgatggcgtcacaaccatcgctaataaccttaccagcacggttcaagtcttctcggactcggagtaccagcttccgtacgtcctcggctctgcgcaccagggctgcctccctccgttcccggcggacgtgttcatgattccgcaatacggctacctgacgctcaacaatggcagccaagccgtgggacgttcatccttttactgcctggaatatttcccttctcagatgctgagaacgggcaacaactttaccttcagctacacctttgaggaagtgcctttccacagcagctacgcgcacagccagagcctggaccggctgatgaatcctctcatcgaccaatacctgtattacctgaacagaactcaaaatcagtccggaagtgcccaaaacaaggacttgctgtttagccgtgggtctccagctggcatgtctgttcagcccaaaaactggctacctggaccctgttatcggcagcagcgcgtttctaaaacaaaaacagacaacaacaacagcaattttacctggactggtgcttcaaaatataacctcaatgggcgtgaatccatcatcaaccctggcactgctatggcctcacacaaagacgacgaagacaagttctttcccatgagcggtgtcatgatttttggaaaagagagcgccggagcttcaaacactgcattggacaatgtcatgattacagacgaagaggaaattaaagccactaaccctgtggccaccgaaagatttgggaccgtggcagtcaatttccagagcagcagcacagaccctgcgaccggagatgtgcatgctatgggagcattacctggcatggtgtggcaagatagagacgtgtacctgcagggtcccatttgggccaaaattcctcacacagatggacactttcacccgtctcctcttatgggcggctttggactcaagaacccgcctcctcagatcctcatcaaaaacacgcctgttcctgcgaatcctccggcggagttttcagctacaaagtttgcttcattcatcacccaatactccacaggacaagtgagtgtggaaattgaatgggagctgcagaaagaaaacagcaagcgctggaatcccgaagtgcagtacacatccaattatgcaaaatctgccaacgttgattttactgtggacaacaatggactttatactgagcctcgccccattggcacccgttaccttacccgtcccctgtaa

SEQ ID NO: 370 - protein, 736 aa, unidentified
  source 1..736: note = Adeno-associated virus 1
MAADGYLPDWLEDNLSEGIREWWDLKPGAPKPKANQQKQDDGRGLVLPGYKYLGPFNGLDKGEPVNAADAAALEHDKAYDQQLKAGDNPYLRYNHADAEFQERLQEDTSFGGNLGRAVFQAKKRVLEPLGLVEEGAKTAPGKKRPVEQSPQEPDSSSGIGKTGQQPAKKRLNFGQTGDSESVPDPQPLGEPPATPAAVGPTTMASGGGAPMADNNEGADGVGNASGNWHCDSTWLGDRVITTSTRTWALPTYNNHLYKQISSASTGASNDNHYFGYSTPWGYFDFNRFHCHFSPRDWQRLINNNWGFRPKRLNFKLFNIQVKEVTTNDGVTTIANNLTSTVQVFSDSEYQLPYVLGSAHQGCLPPFPADVFMIPQYGYLTLNNGSQAVGRSSFYCLEYFPSQMLRTGNNFTFSYTFEEVPFHSSYAHSQSLDRLMNPLIDQYLYYLNRTQNQSGSAQNKDLLFSRGSPAGMSVQPKNWLPGPCYRQQRVSKTKTDNNNSNFTWTGASKYNLNGRESIINPGTAMASHKDDEDKFFPMSGVMIFGKESAGASNTALDNVMITDEEEIKATNPVATERFGTVAVNFQSSSTDPATGDVHAMGALPGMVWQDRDVYLQGPIWAKIPHTDGHFHPSPLMGGFGLKNPPPQILIKNTPVPANPPAEFSATKFASFITQYSTGQVSVEIEWELQKENSKRWNPEVQYTSNYAKSANVDFTVDNNGLYTEPRPIGTRYLTRPL

SEQ ID NO: 371 - DNA, 4718 bp, unidentified
  source 1..4718: mol_type = unassigned DNA; note = Adeno-associated virus 1
ttgcccactccctctctgcgcgctcgctcgctcggtggggcctgcggaccaaaggtccgcagacggcagagctctgctctgccggccccaccgagcgagcgagcgcgcagagagggagtgggcaactccatcactaggggtaatcgcgaagcgcctcccacgctgccgcgtcagcgctgacgtaaattacgtcataggggagtggtcctgtattagctgtcacgtgagtgcttttgcgacattttgcgacaccacgtggccatttagggtatatatggccgagtgagcgagcaggatctccattttgaccgcgaaatttgaacgagcagcagccatgccgggcttctacgagatcgtgatcaaggtgccgagcgacctggacgagcacctgccgggcatttctgactcgtttgtgagctgggtggccgagaaggaatgggagctgcccccggattctgacatggatctgaatctgattgagcaggcacccctgaccgtggccgagaagctgcagcgcgacttcctggtccaatggcgccgcgtgagtaaggccccggaggccctcttctttgttcagttcgagaagggcgagtcctacttccacctccatattctggtggagaccacgggggtcaaatccatggtgctgggccgcttcctgagtcagattagggacaagctggtgcagaccatctaccgcgggatcgagccgaccctgcccaactggttcgcggtgaccaagacgcgtaatggcgccggaggggggaacaaggtggtggacgagtgctacatccccaactacctcctgcccaagactcagcccgagctgcagtgggcgtggactaacatggaggagtatataagcgcctgtttgaacctggccgagcgcaaacggctcgtggcgcagcacctgacccacgtcagccagacccaggagcagaacaaggagaatctgaaccccaattctgacgcgcctgtcatccggtcaaaaacctccgcgcgctacatggagctggtcgggtggctggtggaccggggcatcacctccgagaagcagtggatccaggaggaccaggcctcgtacatctccttcaacgccgcttccaactcgcggtcccagatcaaggccgctctggacaatgccggcaagatcatggcgctgaccaaatccgcgcccgactacctggtaggccccgctccgcccgcggacattaaaaccaaccgcatctaccgcatcctggagctgaacggctacgaacctgcctacgccggctccgtctttctcggctgggcccagaaaaggttcgggaagcgcaacaccatctggctgtttgggccggccaccacgggcaagaccaacatcgcggaagccatcgcccacgccgtgcccttctacggctgcgtcaactggaccaatgagaactttcccttcaatgattgcgtcgacaagatggtgatctggtgggaggagggcaagatgacggccaaggtcgtggagtccgccaaggccattctcggcggcagcaaggtgcgcgtggaccaaaagtgcaagtcgtccgcccagatcgaccccacccccgtgatcgtcacctccaacaccaacatgtgcgccgtgattgacgggaacagcaccaccttcgagcaccagcagccgttgcaggaccggatgttcaaatttgaactcacccgccgtctggagcatgactttggcaaggtgacaaagcaggaagtcaaagagttcttccgctgggcgcaggatcacgtgaccgaggtggcgcatgagttctacgtcagaaagggtggagccaacaaaagacccgcccccgatgacgcggataaaagcgagcccaagcgggcctgcccctcagtcgcggatccatcgacgtcagacgcggaaggagctccggtggactttgccgacaggtaccaaaacaaatgttctcgtcacgcgggcatgcttcagatgctgtttccctgcaagacatgcgagagaatgaatcagaatttcaacatttgcttcacgcacgggacgagagactgttcagagtgcttccccggcgtgtcagaatctcaaccggtcgtcagaaagaggacgtatcggaaactctgtgccattcatcatctgctggggcgggctcccgagattgcttgctcggcctgcgatctggtcaacgtggacctggatgactgtgtttctgagcaataaatgacttaaaccaggtatggctgccgatggttatcttccagattggctcgaggacaacctctctgagggcattcgcgagtggtgggacttgaaacctggagccccgaagcccaaagccaaccagcaaaagcaggacgacggccggggtctggtgcttcctggctacaagtacctcggacccttcaacggactcgacaagggggagcccgtcaacgcggcggacgcagcggccctcgagcacgacaaggcctacgaccagcagctcaaagcgggtgacaatccgtacctgcggtataaccacgccgacgccgagtttcaggagcgtctgcaagaagatacgtcttttgggggcaacctcgggcgagcagtcttccaggccaagaagcgggttctcgaacctctcggtctggttgaggaaggcgctaagacggctcctggaaagaaacgtccggtagagcagtcgccacaagagccagactcctcctcgggcatcggcaagacaggccagcagcccgctaaaaagagactcaattttggtcagactggcgactcagagtcagtccccgatccacaacctctcggagaacctccagcaacccccgctgctgtgggacctactacaatggcttcaggcggtggcgcaccaatggcagacaataacgaaggcgccgacggagtgggtaatgcctcaggaaattggcattgcgattccacatggctgggcgacagagtcatcaccaccagcacccgcacctgggccttgcccacctacaataaccacctctacaagcaaatctccagtgcttcaacgggggccagcaacgacaaccactacttcggctacagcaccccctgggggtattttgatttcaacagattccactgccacttttcaccacgtgactggcagcgactcatcaacaacaattggggattccggcccaagagactcaacttcaaactcttcaacatccaagtcaaggaggtcacgacgaatgatggcgtcacaaccatcgctaataaccttaccagcacggttcaagtcttctcggactcggagtaccagcttccgtacgtcctcggctctgcgcaccagggctgcctccctccgttcccggcggacgtgttcatgattccgcaatacggctacctgacgctcaacaatggcagccaagccgtgggacgttcatccttttactgcctggaatatttcccttctcagatgctgagaacgggcaacaactttaccttcagctacacctttgaggaagtgcctttccacagcagctacgcgcacagccagagcctggaccggctgatgaatcctctcatcgaccaatacctgtattacctgaacagaactcaaaatcagtccggaagtgcccaaaacaaggacttgctgtttagccgtgggtctccagctggcatgtctgttcagcccaaaaactggctacctggaccctgttatcggcagcagcgcgtttctaaaacaaaaacagacaacaacaacagcaattttacctggactggtgcttcaaaatataacctcaatgggcgtgaatccatcatcaaccctggcactgctatggcctcacacaaagacgacgaagacaagttctttcccatgagcggtgtcatgatttttggaaaagagagcgccggagcttcaaacactgcattggacaatgtcatgattacagacgaagaggaaattaaagccactaaccctgtggccaccgaaagatttgggaccgtggcagtcaatttccagagcagcagcacagaccctgcgaccggagatgtgcatgctatgggagcattacctggcatggtgtggcaagatagagacgtgtacctgcagggtcccatttgggccaaaattcctcacacagatggacactttcacccgtctcctcttatgggcggctttggactcaagaacccgcctcctcagatcctcatcaaaaacacgcctgttcctgcgaatcctccggcggagttttcagctacaaagtttgcttcattcatcacccaatactccacaggacaagtgagtgtggaaattgaatgggagctgcagaaagaaaacagcaagcgctggaatcccgaagtgcagtacacatccaattatgcaaaatctgccaacgttgattttactgtggacaacaatggactttatactgagcctcgccccattggcacccgttaccttacccgtcccctgtaattacgtgttaatcaataaaccggttgattcgtttcagttgaactttggtctcctgtccttcttatcttatcggttaccatggttatagcttacacattaactgcttggttgcgcttcgcgataaaagacttacgtcatcgggttacccctagtgatggagttgcccactccctctctgcgcgctcgctcgctcggtggggcctgcggaccaaaggtccgcagacggcagagctctgctctgccggccccaccgagcgagcgagcgcgcagagagggagtgggcaa

SEQ ID NO: 372 - DNA, 3131 bp, unidentified
  source 1..3131: mol_type = unassigned DNA; note = Adeno-associated virus
gcggccgcgaattcgcccttggctgcgtcaactggaccaatgagaactttcccttcaatgattgcgtcgacaagatggtgatctggtgggaggagggcaagatgacggccaaggtcgtggagtccgccaaggccattctcggcggcagcaaggtgcgcgtggaccaaaagtgcaagtcgtccgcccagatcgaccccacccccgtgatcgtcacctccaacaccaacatgtgcgccgtgattgacgggaacagcaccaccttcgagcaccagcagcctctccaggaccggatgtttaagttcgaactcacccgccgtctggagcacgactttggcaaggtgacaaagcaggaagtcaaagagttcttccgctgggccagtgatcacgtgaccgaggtggcgcatgagttttacgtcagaaagggcggagccagcaaaagacccgcccccgatgacgcggataaaagcgagcccaagcgggcctgcccctcagtcgcggatccatcgacgtcagacgcggaaggagctccggtggactttgccgacaggtaccaaaacaaatgttctcgtcacgcgggcatgcttcagatgctgtttccctgcaaaacgtgcgagagaatgaatcggaatttcaacatttgcttcacacacggggtcagagactgctcagagtgtttccccggcgtgtcagaatctcaaccggtcgtcagaaagaggacgtatcggaaactccgtgcgattcatcatctgctggggcgggctcccgagattgcttgctcggcctgcgatctggtcaacgtggacctggatgactgtgtttctgagcaataaatgacttaaaccaggtatggctgccgatggttatcttccagattggctcgaggacaacctctctgagggcattcgcgagtggtgggcgctgaaacctggagccccgaagcccaaagccaaccagcaaaagcaggacgacggccggggtctggtgcttcctggctacaagtacctcggacccttcaacggactcgacaagggggagcccgtcaacgcggcggacgcagcggccctcgagcacgacaaggcttacgaccagcagctgcaggcgggtgacaatccgtacctgcggtataaccacgccgacgccgagtttcaggagcgtctgcaagaagatacgtcttttgggggcaacctcgggcgagcagtcttccaggccaagaagcgggttctcgaacctctcggtctggttgaggaaggcgctaagacggctcctggaaagaagagaccggtagagccatcaccccagcgttctccagactcctctacgggcatcggcaagaaaggccaacagcccgccagaaaaagactcaattttggtcagactggcgactcagagtcagttccagaccctcaacctctcggagaacctccagcagcgccctctggtgtgggacctaatacaatggctgcaggcggtggcgcaccaatggcagacaataacgaaggcgccgacggagtgggtagttcctcgggaaattggcattgcgattccacatggctgggcgacagagtcatcaccaccagcacccgaacctgggccctgcccacctacaacaaccacctctacaagcaaatctccaacgggacatcgggaggagccaccaacgacaacacctacttcggctacagcaccccctgggggtattttgactttaacagattccactgccacctttcaccacgtgactggcagcgactcatcaacaacaactggggattccgacccaagagactcagcttcaagctcttcaacatccaggtcaaggaggtcacgcagaatgaaggcaccaagaccatcgccaataacctcaccagcaccatccaggtgtttacggactcggagtaccagctgccgtacgttctcggctctgtccaccagggctgcctgcctccgttcccggcggacgtgttcatgattccccagtacggctacctaacactcaacaacggtagtcaggccgtgggacgctcctccttctactgcctggaatactttccttcgcagatgctgagaaccggcaacaacttccagtttacttacaccttcgaggacgtgcctttccacagcagctacgcccacagctagagcttggaccggctgatgaatcctctgattgaccagtacctgtactacttgtctcggactcaaacaacaggaggcacggcaaatacgcagactctgggcttcagccaaggtgggcctaatacaatggccaatcaggcaaagaactggctgccaggaccctgttaccgccaacaacgcgtctcaacgacaaccgggcaaaacaacaatagcaactttgcctggactgctgggaccaaataccatctgaatggaagaaattcattggctaatcctggcatcgctatggcaacacacaaagacgacgaggagcgtttttttcccagtaacgggatcctgatttttggcaaacaaaatgctgccagagacaatgcggattacagcgatgtcatgctcaccagcgaggaagaaatcaaaaccactaaccctgtggctacagaggaatacggtatcgtggcagataacttgcagcagcaaaacacggctcctcaaattggaactgtcaacagccagggggccttacccggtatggtctggcagaaccgggacgtgtacctgcagggtcccatctgggccaagattcctcacacggacggcaacttccacccgtctccgctgatgggcggctttggcctgaaacatcctccgcctcagatcctgatcaagaacacgcctgtacctgcggatcctccgaccaccttcaaccagtcaaagctgaactctttcatcacgcaatacagcaccggacaggtcagcgtggaaattgaatgggagctgcagaaggaaaacagcaagcgctggaaccccgagatccagtacacctccaactactacaaatctataagtgtggactttgctgttaatacagaaggcgtgtactctgaaccccgccccattggcacccgttacctcacccgtaatctgtaattgcctgttaatcaataaaccggttgattcgtttcagttgaactttggtctctgcgaagggcgaattc

SEQ ID NO: 373 - DNA, 255 bp, unidentified
  source 1..255: mol_type = unassigned DNA; note = Adeno-associated virus 10
ggtaattcctccggaaattggcattgcgattccacatggctgggcgacagagtcatcaccaccagcacccgaacctgggtcctgcccacctacaacaaccacatctacaagcaaatctccagcgagacaggagccaccaacgacaaccactacttcggctacagcaccccctgggggtattttgactttaacagattccactgccacttttcaccacgtgactggcagcgactcatcaacaacaactggggattc

SEQ ID NO: 374 - protein, 738 aa, unidentified
  source 1..738: note = Adeno-associated virus 10
MAADGYLPDWLEDNLSEGIREWWDLKPGAPKPKANQQKQDDGRGLVLPGYKYLGPFNGLDKGEPVNAADAAALEHDKAYDQQLKAGDNPYLRYNHADAEFQERLQEDTSFGGNLGRAVFQAKKRVLEPLGLVEEAAKTAPGKKRPVEPSPQRSPDSSTGIGKKGQQPAKKRLNFGQTGESESVPDPQPIGEPPAGPSGLGSGTMAAGGGAPMADNNEGADGVGSSSGNWHCDSTWLGDRVITTSTRTWALPTYNNHLYKQISNGTSGGSTNDNTYFGYSTPWGYFDFNRFHCHFSPRDWQRLINNNWGFRPKRLSFKLFNIQVKEVTQNEGTKTIANNLTSTIQVFTDSEYQLPYVLGSAHQGCLPPFPADVFMIPQYGYLTLNNGSQAVGRSSFYCLEYFPSQMLRTGNNFEFSYTFEDVPFHSSYAHSQSLDRLMNPLIDQYLYYLSRTQSTGGTQGTQQLLFSQAGPANMSAQAKNWLPGPCYRQQRVSTTLSQNNNSNFAWTGATKYHLNGRDSLVNPGVAMATHKDDEERFFPSSGVLMFGKQGAGRDNVDYSSVMLTSEEEIKTTNPVATEQYGVVADNLQQANTGPIVGNVNSQGALPGMVWQNRDVYLQGPIWAKIPHTDGNFHPSPLMGGFGLKHPPPQILIKNTPVPADPPTTFSQAKLASFITQYSTGQVSVEIEWELQKENSKRWNPEIQYTSNYYKSTNVDFAVNTEGTYSEPRPIGTRYLTRNL

SEQ ID NO: 375 - protein, 738 aa, unidentified
  source 1..738: note = Adeno-associated virus 10
MAADGYLPDWLEDNLSEGIREWWDLKPGAPKPKANQQKQDDGRGLVLPGYKYLGPFNGLDKGEPVNAADAAALEHDKAYDQQLKAGDNPYLRYNHADAEFQERLQEDTSFGGNLGRAVFQAKKRVLEPLGLVEEGAKTAPGKKRPVEPSPQRSPDSSTGIGKKGQQPAKKRLNFGQTGDSESVPDPQPIGEPPAGPSGLGSGTMAAGGGAPMADNNEGADGVGSSSGNWHCDSTWLGDRVITTSTRTWALPTYNNHLYKQISNGTSGGSTNDNTYFGYSTPWGYFDFNRFHCHFSPRDWQRLINNNWGFRPKRLNFKLFNIQVKEVTQNEGTKTIANNLTSTIQVFTDSEYQLPYVLGSAHQGCLPPFPADVFMIPQYGYLTLNNGSQAVGRSSFYCLEYFPSQMLRTGNNFEFSYQFEDVPFHSSYAHSQSLDRLMNPLIDQYLYYLSRTQSTGGTAGTQQLLFSQAGPNNMSAQAKNWLPGPCYRQQRVSTTLSQNNNSNFAWTGATKYHLNGRDSLVNPGVAMATHKDDEERFFPSSGVLMFGKQGAGKDNVDYSSVMLTSEEEIKTTNPVATEQYGVVADNLQQQNAAPIVGAVNSQGALPGMVWQNRDVYLQGPIWAKIPHTDGNFHPSPLMGGFGLKHPPPQILIKNTPVPADPPTTFSQAKLASFITQYSTGQVSVEIEWELQKENSKRWNPEIQYTSNYYKSTNVDFAVNTDGTYSEPRPIGTRYLTRNL

SEQ ID NO: 376 - DNA, 258 bp, unidentified
  source 1..258: mol_type = unassigned DNA; note = Adeno-associated virus 11
ggtaattcctccggaaattggcattgcgattccacatggctgggcgacagagtcatcaccaccagcacccgaacctgggccctgccaacctacaacaaccacctctacaaacaaatctccagcgcttcaacgggggccagcaacgacaaccactactttggctacagcaccccctgggggtattttgactttaacagattccactgccacttctcaccacgtgactggcagcgactcatcaacaacaactggggattc

SEQ ID NO: 377 - DNA, 255 bp, unidentified
  source 1..255: mol_type = unassigned DNA; note = Adeno-associated virus 12
ggtaattcctccggaaattggcattgcgattccacatggctgggcgaccgagtcattaccaccagcacccggacttgggccctgcccacctacaacaaccacctctacaagcaaatctccagccaatcgggtgccaccaacgacaaccactacttcggctacagcaccccttgggggtattttgatttcaacagattccactgccatttctcaccacgtgactggcagcgactcatcaacaacaactggggattc

SEQ ID NO: 378 - DNA, 2208 bp, unidentified
  source 1..2208: mol_type = unassigned DNA; note = Adeno-associated virus 2
atggctgccgatggttatcttccagattggctcgaggacactctctctgaaggaataagacagtggtggaagctcaaacctggcccaccaccaccaaagcccgcagagcggcataaggacgacagcaggggtcttgtgcttcctgggtacaagtacctcggacccttcaacggactcgacaagggagagccggtcaacgaggcagacgccgcggccctcgagcacgacaaagcctacgaccggcagctcgacagcggagacaacccgtacctcaagtacaaccacgccgacgcggagtttcaggagcgccttaaagaagatacgtcttttgggggcaacctcggacgagcagtcttccaggcgaaaaagagggttcttgaacctctgggcctggttgaggaacctgttaagacggctccgggaaaaaagaggccggtagagcactctcctgtggagccagactcctcctcgggaaccggaaaggcgggccagcagcctgcaagaaaaagattgaattttggtcagactggagacgcagactcagtacctgacccccagcctctcggacagccaccagcagccccctctggtctgggaactaatacgatggctacaggcagtggcgcaccaatggcagacaataacgagggcgccgacggagtgggtaattcctcgggaaattggcattgcgattccacatggatgggcgacagagtcatcaccaccagcacccgaacctgggccctgcccacctacaacaaccacctctacaaacaaatttccagccaatcaggagcctcgaacgacaatcactactttggctacagcaccccttgggggtattttgacttcaacagattccactgccacttttcaccacgtgactggcaaagactcatcaacaacaactggggattccgacccaagagactcaacttcaagctctttaacattcaagtcaaagaggtcacgcagaatgacggtacgacgacgattgccaataaccttaccagcacggttcaggtgtttactgactcggagtaccagctcccgtacgtcctcggctcggcgcatcaaggatgcctcccgccgttcccagcagacgtcttcatggtgccacagtatggatacctcaccctgaacaacgggagtcaggcagtaggacgctcttcattttactgcctggagtactttccttctcagatgctgcgtaccggaaacaactttaccttcagctacacttttgaggacgttcctttccacagcagctacgctcacagccagagtctggaccgtctcatgaatcctctcatcgaccagtacctgtattacttgagcagaacaaacactccaagtggaaccaccacgcagtcaaggcttcagttttctcaggccggagcgagtgacattcgggaccagtctaggaactggcttcctggaccctgttaccgccagcagcgagtatcaaagacatctgcggataacaacaacagtgaatactcgtggactggagctaccaagtaccacctcaatggcagagactctctggtgaatccgggcccggccatggcaagccacaaggacgatgaagaaaagttttttcctcagagcggggttctcatctttgggaagcaaggctcagagaaaacaaatgtggacattgaaaaggtcatgattacagacgaagaggaaatcaggacaaccaatcccgtggctacggagcagtatggttctgtatctaccaacctccagagaggcaacagacaagcagctaccgcagatgtcaacacacaaggcgttcttccaggcatggtctggcaggacagagatgtgtaccttcaggggcccatctgggcaaagattccacacacggacggacattttcacccctctcccctcatgggtggattcggacttaaacaccctcctccacagattctcatcaagaacaccccggtacctgcgaatccttcgaccaccttcagtgcggcaaagtttgcttccttcatcacacagtactccacgggacaggtcagcgtggagatcgagtgggagctgcagaaggaaaacagcaaacgctggaatcccgaaattcagtacacttccaactacaacaagtctgttaatgtggactttactgtggacactaatggcgtgtattcagagcctcgccccattggcaccagatacctgactcgtaatctgtaa

SEQ ID NO: 379 - protein, 735 aa, unidentified [sequence omitted]

SEQ ID NO: 380 - protein, 621 aa, unidentified
  source 1..621: note = Adeno-associated virus 2
MPGFYEIVIKVPSDLDGHLPGISDSFVNWVAEKEWELPPDSDMDLNLIEQAPLTVAEKLQRDFLTEWRRVSKAPEALFFVQFEKGESYFHMHVLVETTGVKSMVLGRFLSQIREKLIQRIYRGIEPTLPNWFAVTKTRNGAGGGNKVVDECYIPNYLLPKTQPELQWAWTNMEQYLSACLNLTERKRLVAQHLTHVSQTQEQNKENQNPNSDAPVIRSKTSARYMELVGWLVDKGITSEKQWIQEDQASYISFNAASNSRSQIKAALDNAGKIMSLTKTAPDYLVGQQPVEDISSNRIYKILELNGYDPQYAASVFLGWATKKFGKRNTIWLFGPATTGKTNIAEAIAHTVPFYGCVNWTNENFPFNDCVDKMVIWWEEGKMTAKVVESAKAILGGSKVRVDQKCKSSAQIDPTPVIVTSNTNMCAVIDGNSTTFEHQQPLQDRMFKFELTRRLDHDFGKVTKQEVKDFFRWAKDHVVEVEHEFYVKKGGAKKRPAPSDADISEPKRVRESVAQPSTSDAEASINYADRYQNKCSRHVGMNLMLFPCRQCERMNQNSNICFTHGQKDCLECFPVSESQPVSVVKKAYQKLCYIHHIMGKVPDACTACDLVNVDLDDCIFEQ

SEQ ID NO: 381 - DNA, 4675 bp, unidentified
  source 1..4675: mol_type = unassigned DNA; note = Adeno-associated virus 2
ttggccactccctctctgcgcgctcgctcgctcactgaggccgggcgaccaaaggtcgcccgacgcccgggctttgcccgggcggcctcagtgagcgagcgagcgcgcagagagggagtggccaactccatcactaggggttcctggaggggtggagtcgtgacgtgaattacgtcatagggttagggaggtcctgtattagaggtcacgtgagtgttttgcgacattttgcgacaccatgtggtcacgctgggtatttaagcccgagtgagcacgcagggtctccattttgaagcgggaggtttgaacgcgcagccgccatgccggggttttacgagattgtgattaaggtccccagcgaccttgacgggcatctgcccggcatttctgacagctttgtgaactgggtggccgagaaggaatgggagttgccgccagattctgacatggatctgaatctgattgagcaggcacccctgaccgtggccgagaagctgcagcgcgactttctgacggaatggcgccgtgtgagtaaggccccggaggcccttttctttgtgcaatttgagaagggagagagctacttccacatgcacgtgctcgtggaaaccaccggggtgaaatccatggttttgggacgtttcctgagtcagattcgcgaaaaactgattcagagaatttaccgcgggatcgagccgactttgccaaactggttcgcggtcacaaagaccagaaatggcgccggaggcgggaacaaggtggtggatgagtgctacatccccaattacttgctccccaaaacccagcctgagctccagtgggcgtggactaatatggaacagtatttaagcgcctgtttgaatctcacggagcgtaaacggttggtggcgcagcatctgacgcacgtgtcgcagacgcaggagcagaacaaagagaatcagaatcccaattctgatgcgccggtgatcagatcaaaaacttcagccaggtacatggagctggtcgggtggctcgtggacaaggggattacctcggagaagcagtggatccaggaggaccaggcctcatacatctccttcaatgcggcctccaactcgcggtcccaaatcaaggctgccttggacaatgcgggaaagattatgagcctgactaaaaccgcccccgactacctggtgggccagcagcccgtggaggacatttccagcaatcggatttataaaattttggaactaaacgggtacgatccccaatatgcggcttccgtctttctgggatgggccacgaaaaagttcggcaagaggaacaccatctggctgtttgggcctgcaactaccgggaagaccaacatcgcggaggccatagcccacactgtgcccttctacgggtgcgtaaactggaccaatgagaactttcccttcaacgactgtgtcgacaagatggtgatctggtgggaggaggggaagatgaccgccaaggtcgtggagtcggccaaagccattctcggaggaagcaaggtgcgcgtggaccagaaatgcaagtcctcggcccagatagacccgactcccgtgatcgtcacctccaacaccaacatgtgcgccgtgattgacgggaactcaacgaccttcgaacaccagcagccgttgcaagaccggatgttcaaatttgaactcacccgccgtctggatcatgactttgggaaggtcaccaagcaggaagtcaaagactttttccggtgggcaaaggatcacgtggttgaggtggagcatgaattctacgtcaaaaagggtggagccaagaaaagacccgcccccagtgacgcagatataagtgagcccaaacgggtgcgcgagtcagttgcgcagccatcgacgtcagacgcggaagcttcgatcaactacgcagacaggtaccaaaacaaatgttctcgtcacgtgggcatgaatctgatgctgtttccctgcagacaatgcgagagaatgaatcagaattcaaatatctgcttcactcacggacagaaagactgtttagagtgctttcccgtgtcagaatctcaacccgtttctgtcgtcaaaaaggcgtatcagaaactgtgctacattcatcatatcatgggaaaggtgccagacgcttgcactgcctgcgatctggtcaatgtggatttggatgactgcatctttgaacaataaatgatttaaatcaggtatggctgccgatggttatcttccagattggctcgaggacactctctctgaaggaataagacagtggtggaagctcaaacctggcccaccaccaccaaagcccgcagagcggcataaggacgacagcaggggtcttgtgcttcctgggtacaagtacctcggacccttcaacggactcgacaagggagagccggtcaacgaggcagacgccgcggccctcgagcacgtacaaagcctacgaccggcagctcgacagcggagacaacccgtacctcaagtacaaccacgccgacgcggagtttcaggagcgccttaaagaagatacgtcttttgggggcaacctcggacgagcagtcttccaggcgaaaaagagggttcttgaacctctgggcctggttgaggaacctgttaagacggctccgggaaaaaagaggccggtagagcactctcctgtggagccagactcctcctcgggaaccggaaaggcgggccagcagcctgcaagaaaaagattgaattttggtcagactggagacgcagactcagtacctgacccccagcctctcggacagccaccagcagccccctctggtctgggaactaatacgatggctacaggcagtggcgcaccaatggcagacaataacgagggcgccgacggagtgggtaattcctccggaaattggcattgcgattccacatggatgggcgacagagtcatcaccaccagcacccgaacctgggccctgcccacctacaacaaccacctctacaaacaaatttccagccaatcaggagcctcgaacgacaatcactactttggctacagcaccccttgggggtattttgacttcaacagattccactgccacttttcaccacgtgactggcaaagactcatcaacaacaactggggattccgacccaagagactcaacttcaagctctttaacattcaagtcaaagaggtcacgcagaatgacggtacgacgacgattgccaataaccttaccagcacggttcaggtgtttactgactcggagtaccagctcccgtacgtcctcggctcggcgcatcaaggatgcctcccgccgttcccagcagacgtcttcatggtgccacagtatggatacctcaccctgaacaacgggagtcaggcagtaggacgctcttcattttactgcctggagtactttccttctcagatgctgcgtaccggaaacaactttaccttcagctacacttttgaggacgttcctttccacagcagctacgctcacagccagagtctggaccgtctcatgaatcctctcatcgaccagtacctgtattacttgagcagaacaaacactccaagtggaaccaccacgcagtcaaggcttcagttttctcaggccggagcgagtgacattcgggaccagtctaggaactggcttcctggaccctgttaccgccagcagcgagtatcaaagacatctgcggataacaacaacagtgaatactcgtggactggagctaccaagtaccacctcaatggcagagactctctggtgaatccggccatggcaagccacaaggacgatgaagaaaagttttttcctcagagcggggttctcatctttgggaagcaaggctcagagaaaacaaatgtgaacattgaaaaggtcatgattacagacgaagaggaaatcggaacaaccaatcccgtggctacggagcagtatggttctgtatctaccaacctccagagaggcaacagacaagcagctaccgcagatgtcaacacacaaggcgttcttccaggcatggtctggcaggacagagatgtgtaccttcaggggcccatctgggcaaagattccacacacggacggacattttcacccctctcccctcatgggtggattcggacttaaacaccctcctccacagattctcatcaagaacaccccggtacctgcgaatccttcgaccaccttcagtgcggcaaagtttgcttccttcatcacacagtactccacgggacacggtcagcgtggagatcgagtgggagctgcagaaggaaaacagcaaacgctggaatcccgaaattcagtacacttccaactacaacaagtctgttaatcgtggacttaccgtggatactaatggcgtgtattcagagcctcgccccattggcaccagatacctgactcgtaatctgtaattgcttgttaatcaataaaccgtttaattcgtttcagttgaactttggtctctgcgtatttctttcttatctagtttccatggctacgtagataagtagcatggcgggttaatcattaactacaaggaacccctagtgatggagttggccactccctctctgcgcgctcgctcgctcactgaggccgggcgaccaaaggtcgcccgacgcccgggctttgcccgggcggcctcagtgagcgagcgagcgcgcagagagggagtggccaa

SEQ ID NO: 382 - DNA, 4679 bp, unidentified
  source 1..4679: mol_type = unassigned DNA; note = Adeno-associated virus 2
ttggccactccctctctgcgcgctcgctcgctcactgaggccgggcgaccaaaggtcgcccgacgcccgggctttgcccgggcggcctcagtgagcgagcgagcgcgcagagagggagtggccaactccatcactaggggttcctggaggggtggagtcgtgacgtgaattacgtcatagggttagggaggtcctgtattagaggtcacgtgagtgttttgcgacattttgcgacaccatgtggtcacgctgggtatttaagcccgagtgagcacgcagggtctccattttgaagcgggaggtttgaacgcgcagccgccatgccggggttttacgagattgtgattaaggtccccagcgaccttgacgggcatctgcccggcatttctgacagctttgtgaactgggtggccgagaaggaatgggagttgccgccagattctgacatggatctgaatctgattgagcaggcacccctgaccgtggccgagaagctgcagcgcgactttctgacggaatggcgccgtgtgagtaaggccccggaggcccttttctttgtgcaatttgagaagggagagagctacttccacatgcacgtgctcgtggaaaccaccggggtgaaatccatggttttgggacgtttcctgagtcagattcgcgaaaaactgattcagagaatttaccgcgggatcgagccgactttgccaaactggttcgcggtcacaaagaccagaaatggcgccggaggcgggaacaaggtggtggatgagtgctacatccccaattacttgctccccaaaacccagcctgagctccagtgggcgtggactaatatggaacagtatttaagcgcctgtttgaatctcacggagcgtaaacggttggtggcgcagcatctgacgcacgtgtcgcagacgcaggagcagaacaaagagaatcagaatcccaattctgatgcgccggtgatcagatcaaaaacttcagccaggtacatggagctggtcgggtggctcgtggacaaggggattacctcggagaagcagtggatccaggaggaccaggcctcatacatctccttcaatgcggcctccaactcgcggtcccaaatcaaggctgccttggacaatgcgggaaagattatgagcctgactaaaaccgcccccgactacctggtgggccagcagcccgtggaggacatttccagcaatcggatttataaaattttggaactaaacgggtacgatccccaatatgcggcttccgtctttctgggatgggccacgaaaaagttcggcaagaggaacaccatctggctgtttgggcctgcaactaccgggaagaccaacatcgcggaggccatagcccacactgtgcccttctacgggtgcgtaaactggaccaatgagaactttcccttcaacgactgtgtcgacaagatggtgatctggtgggaggaggggaagatgaccgccaaggtcgtggagtcggccaaagccattctcggaggaagcaaggtgcgcgtggaccagaaatgcaagtcctcggcccagatagacccgactcccgtgatcgtcacctccaacaccaacatgtgcgccgtgattgacgggaactcaacgaccttcgaacaccagcagccgttgcaagaccggatgttcaaatttgaactcacccgccgtctggatcatgactttgggaaggtcaccaagcaggaagtcaaagactttttccggtgggcaaaggatcacgtggttgaggtggagcatgaattctacgtcaaaaagggtggagccaagaaaagacccgcccccagtgacgcagatataagtgagcccaaacgggtgcgcgagtcagttgcgcagccatcgacgtcagacgcggaagcttcgatcaactacgcagacaggtaccaaaacaaatgttctcgtcacgtgggcatgaatctgatgctgtttccctgcagacaatgcgagagaatgaatcagaattcaaatatctgcttcactcacggacagaaagactgtttagagtgctttcccgtgtcagaatctcaacccgtttctgtcgtcaaaaaggcgtatcagaaactgtgctacattcatcatatcatgggaaaggtgccagacgcttgcactgcctgcgatctggtcaatgtggatttggatgactgcatctttgaacaataaatgatttaaatcaggtatggctgccgatggttatcttccagattggctcgaggacactctctctgaaggaataagacagtggtggaagctcaaacctggcccaccaccaccaaagcccgcagagcggcataaggacgacagcaggggtcttgtgcttcctgggtacaagtacctcggacccttcaacggactcgacaagggagagccggtcaacgaggcagacgccgcggccctcgagcacgacaaagcctacgaccggcagctcgacagcggagacaacccgtacctcaagtacaaccacgccgacgcggagtttcaggagcgccttaaagaagatacgtcttttgggggcaacctcggacgagcagtcttccaggcgaaaaagagggttcttgaacctctgggcctggttgaggaacctgttaagacggctccgggaaaaaagaggccggtagagcactctcctgtggagccagactcctcctcgggaaccggaaaggcgggccagcagcctgcaagaaaaagattgaattttggtcagactggagacgcagactcagtacctgacccccagcctctcggacagccaccagcagccccctctggtctgggaactaatacgatggctacaggcagtggcgcaccaatggcagacaataacgagggcgccgacggagtgggtaattcctccggaaattggcattgcgattccacatggatgggcgacagagtcatcaccaccagcacccgaacctgggccctgcccacctacaacaaccacctctacaaacaaatttccagccaatcaggagcctcgaacgacaatcactactttggctacagcaccccttgggggtattttgacttcaacagattccactgccacttttcaccacgtgactggcaaagactcatcaacaacaactggggattccgacccaagagactcaacttcaagctctttaacattcaagtcaaagaggtcacgcagaatgacggtacgacgacgattgccaataaccttaccagcacggttcaggtgtttactgactcggagtaccagctcccgtacgtcctcggctcggcgcatcaaggatgcctcccgccgttcccagcagacgtcttcatggtgccacagtatggatacctcaccctgaacaacgggagtcaggcagtaggacgctcttcattttactgcctggagtactttccttctcagatgctgcgtaccggaaacaactttaccttcagctacacttttgaggacgttcctttccacagcagctacgctcacagccagagtctggaccgtctcatgaatcctctcatcgaccagtacctgtattacttgagcagaacaaacactccaagtggaaccaccacgcagtcaaggcttcagttttctcaggccggagcgagtgacattcgggaccagtctaggaactggcttcctggaccctgttaccgccagcagcgagtatcaaagacatctgcggataacaacaacagtgaatactcgtggactggagctaccaagtaccacctcaatggcagagactctctggtgaatccgggcccggccatggcaagccacaaggacgatgaagaaaagttttttcctcagagcggggttctcatctttgggaagcaaggctcagagaaaacaaatgtggacattgaaaaggtcatgattacagacgaagaggaaatcaggacaaccaatcccgtggctacggagcagtatggttctgtatctaccaacctccagagaggcaacagacaagcagctaccgcagatgtcaacacacaaggcgttcttccaggcatggtctggcaggacagagatgtgtaccttcaggggcccatctgggcaaagattccacacacggacggacattttcacccctctcccctcatgggtggattcggacttaaacaccctcctccacagattctcatcaagaacaccccggtacctgcgaatccttcgaccaccttcagtgcggcaaagtttgcttccttcatcacacagtactccacgggacaggtcagcgtggagatcgagtgggagctgcagaaggaaaacagcaaacgctggaatcccgaaattcagtacacttccaactacaacaagtctgttaatgtggactttactgtggacactaatggcgtgtattcagagcctcgccccattggcaccagatacctgactcgtaatctgtaattgcttgttaatcaataaaccgtttaattcgtttcagttgaactttggtctctgcgtatttctttcttatctagtttccatggctacgtagataagtagcatggcgggttaatcattaactacaaggaacccctagtgatggagttggccactccctctctgcgcgctcgctcgctcactgaggccgggcgaccaaaggtcgcccgacgcccgggctttgcccgggcggcctcagtgagcgagcgagcgcgcagagagggagtggccaa

SEQ ID NO: 383 - protein, 725 aa, unidentified
  source 1..725: note = Adeno-associated virus 5
MAADGYLPDWLEDTLSEGIRQWWKLKPGPPPPKPAERHKDDSRGLVLPGYKYLGPFNGLDKGEPVNEADAAALEHDKAYDRQLDSGDNPYLKYNHADAEFQERLKEDTSFGGNLGRAVFQAKKRVLEPFGLVEEGAKTAPTGKRIDDHFPKRKKARTEEDSKPSTSSDAEAGPSGSQQLQIPAQPASSLGADTMSAGGGGPLGDNNQGADGVGNASGDWHCDSTWMGDRVVTKSTRTWVLPSYNNHQYREIKSGSVDGSNANAYFGYSTPWGYFDFNRFHSHWSPRDWQRLINNYWGFRPRSLRVKIFNIQVKEVTVQDSTTTIANNLTSTVQVFTDDDYQLPYVVGNGTEGCLPAFPPQVFTLPQYGYATLNRDNTENPTERSSFFCLEYFPSKMLRTGNNFEFTYNFEEVPFHSSFAPSQNLFKLANPLVDQYLYRFVSTNNTGGVQFNKNLAGRYANTYKNWFPGPMGRTQGWNLGSGVNRASVSAFATTNRMELEGASYQVPPQPNGMTNNLQGSNTYALENTMIFNSQPANPGTTATYLEGNMLITSESETQPVNRVAYNVGGQMATNNQSSTTAPTTGTYNLQEIVPGSVWMERDVYLQGPIWAKIPETGAHFHPSPAMGGFGLKHPPPMMLIKNTPVPGNITSFSDVPVSSFITQYSTGQVTVEMEWELKKENSKRWNPEIQYTNNYNDPQFVDFAPDSTGEYRTTRPIGTRYLTRPL

SEQ ID NO: 384 - protein, 644 aa, unidentified
  source 1..644: note = Adeno-associated virus
  VARIANT 434: note = MOD_RES - Any amino acid
KAYDQQLKAGDNPYLRYNHADAEFQERLQEDTSFGGNLGRAVFQAKKRVLEPLGLVETPAKTAPGKKRPVDSPDSTSGIGKKGQQPAKKRLNFGQTGDSESVPDPQPIGEPPAGPSGLGSGTMAAGGGAPMADNNEGADGVGNASGNWHCDSTWLGDRVITTSTRTWALPTYNNHLYKQISSQSAGSTNDNVYFGYSTPWGYFDFNRFHCHFSPRDWQRLINNNWGFRPKKLNFKLFNIQVKEVTTNDGVTTIANNLTSTVQVFSDSEYQLPYVLGSAHQGCLPPFPADVFMIPQYGYLTLNNGSQSVGRSSFYCLEYFPSQMLRTGNNFTFSYTFEDVPFHSSYAHSQSLDRLMNPLIDQYLYYLARTQSNAGGTAGNRELQFYQGGPTTMAEQAKNWLPGPCFRQQRVSKTLDQNNNSNFAWTGATKYHLNXRNSLVNPGVAMATHKDDEERFFPSSGVLIFGKTGAANKTTLENVLMTNEEEIRPTNPVATEEYGIVSSNLQAASTAAQTQVVNNQGALPGMVWQNRDVYLQGPIWAKIPHTDGNFHPSPLMGGFGLKHPPPQILIKNTPVPANPPEVFTPAKFASFITQYSTGQVSVEIEWELQKENSKRWNPEIQYTSNFDKQTGVDFAVDSQGVYSEP

SEQ ID NO: 385 - DNA, 1933 bp, unidentified
  source 1..1933: mol_type = unassigned DNA; note = Adeno-associated virus
caaggcctacgaccagcagctcaaagcgggtgacaatccgtacctgcggtataaccacgccgacgccgagtttcaggagtgtcttcaagaagatacgtcttttgggggcaacctcgggcgagcagtcttccaggccaaaaagcgggttctcgaacctcttggtctggttgagacgccagctaagacggcacctggaaagaagcgaccggtagactcgccagactccacctcgggcatcggcaagaaaggccagcagcccgcgaaaaagagactcaactttgggcagactggcgactcagagtcagtccccgaccctcaaccaatcggagaaccaccagcaggcccctctggtctgggatctggtacaatggttgcaggcggtggcgcaccaatggctgacaataacgagggcgccgacggagtgggtaatgcctcaggaaattggcattgcgattccacatggctgggcgacagagtcatcaccaccagcacccgaacctgggccctgcccacctacaacaaccacctctacaagcaaatctccagtcagtcagcagggagcaccaacgataacgtctatttcggctacagcaccccctgggggtattttgacttcaacagattccattgccacttctcaccacgtgactggcagcgacttatcaacaacaactggggattccggcccaagaagctcaacttcaagctcttcaacatccaggtcaaggaggtcacgacgaatgacggtgtcacaaccatcgctaataaccttaccagcacggttcaggtcttttcggactcggaatatcaactgccgtacgtcctcggctccgcgcaccagggctgcctgcctccgttcccggcagacgtgttcatgattccgcagtacggatacctgactctgaacaatggcagccaatcggtaggccgttcctccttctactgcctggagtactttccttctcagatgctgagaacgggcaacaacttcacctttagctacaccttcgaggacgtgcctttccacagcagctacgcgcacagccagagtctggaccggctgatgaatcccctcatcgaccagtacctgtactacttggccagaacacagagcaacgcaggaggtactgctggcaatcgggaactgcagttttatcagggcggacctaccaccatggccgaacaagcaaagaactggctgcccggaccttgcttccggcaacagagagtatccaagacgctggatcaaaataacaacagcaactttgcctggactggtgccacaaaataccatttaaatggaagaaattcattggttaatcccggtgtcgccatggcaacccacaaggacgacgaggaacgcttctccccttcgagcggagttctaatttttggcaaaactggagcagctaataaaactacattagaaaacgtgctcatgacaaatgaagaagaaattcgtcctaccaacccggtagctaccgaggaatacgggattgtaagcagcaacttgcaggcggctagcaccgcagcccagacacaagttgttaacaaccagggagccttacctggcatggtctggcagaaccgggacgtgtacctgcaaggtcccatttgggccaagattcctcacacggacggcaactttcacccgtctcctctaatgggtggctttggactgaaacacccgcctccccagatcctgatcaaaaacacgccggtacctgctaatcctccagaagtgtttactcctgccaagtttgcttccttcatcacgcagtacagcaccgggcaagtcagcgttgagatcgagtgggagctgcagaaagagaacagcaagcgctggaacccagagattcagtacacctccaactttgacaaacagactggagtggactttgctgttgacagccagggtgtttactctgagcct

SEQ ID NO: 386 - protein, 644 aa, unidentified
  source 1..644: note = Adeno-associated virus
KAYDQQLKAGDNPYLRYNHADAEFQECLQEDTSFGGNLGRAVFQAKKRVLEPLGLVETPAKTAPGKKRPVDSPDSTSGIGKKGQQPAKKRLNFGQTGDSESVPDPQPIGEPPAGPSGLGSGTMVAGGGAPMADNNEGADGVGNASGNWHCDSTWLGDRVITTSTRTWALPTYNNHLYKQISSQSAGSTNDNVYFGYSTPWGYFDFNRFHCHFSPRDWQRLINNNWGFRPKKLNFKLFNIQVKEVTTNDGVTTIANNLTSTVQVFSDSEYQLPYVLGSAHQGCLPPFPADVFMIPQYGYLTLNNGSQSVGRSSFYCLEYFPSQMLRTGNNFTFSYTFEDVPFHSSYAHSQSLDRLMNPLIDQYLYYLARTQSNAGGTAGNRELQFYQGGPTTMAEQAKNWLPGPCFRQQRVSKTLDQNNNSNFAWTGATKYHLNGRNSLVNPGVAMATHKDDEERFSPSSGVLIFGKTGAANKTTLENVLMTNEEEIRPTNPVATEEYGIVSSNLQAASTAAQTQVVNNQGALPGMVWQNRDVYLQGPIWAKIPHTDGNFHPSPLMGGFGLKHPPPQILIKNTPVPANPPEVFTPAKFASFITQYSTGQVSVEIEWELQKENSKRWNPEIQYTSNFDKQTGVDFAVDSQGVYSEP

SEQ ID NO: 387 - DNA, 1933 bp, unidentified
  source 1..1933: mol_type = unassigned DNA; note = Adeno-associated virus
caaggcctacgaccagcagctcaaagcgggtgacaatccgtacctgcggtataaccacgccgacgccgagtttcaggagcgtcttcaagaagatacgtcttttgggggcaacctcgggcgagcagtcttccaggccaaaaagcgggttctcgaacctcttggtctggttgagacgccagctaagacggcacctggaaagaagcgaccggtagactcgccagactccacctcgggcatcggcaagaaaggccagcagcccgcgaaaaagagactcaactttgggcagactggcgactcagagccagtccccgaccctcaaccaatcggagaaccaccagcaggcccctctggtctgggatctggtacaatggctgcaggcggtggcgcaccaatggctgacaataacgagggcgccgacggagtgggtaatgcctcaggaaattggcattgcgattccacacggctgggcgacagagtcatcaccaccagcacccgaacctgggccctgcccacctacaacaaccacctctacaagcaaatctccagtcagtcagcagggagcaccaacgataacgtctatttcggctacagcaccccctgggggtattttgacttcaacagattccattgccacttctcaccacgtgactggcagcgacttatcaacaacaactggggattccggcccaagaagctcaacttcaagctcttcaacatccaggtcaaggaggtcacgacgaatgacggcgtcacaaccatcgctaataaccttaccagcacggttcaggtcttttcggactcggaatatcaactgccgtacgtcctcggctccgcgcaccagggctgcctgcctccgttcccggcagacgtgttcatgattccgcagtacggatacctgactctgaacaatggcagccaatcggtaggccgttcctccttctactgcctggagtactttccttctcagatgctgagaacgggcaacaacttcacctttagctacaccttcgaggacgtgcctttccacagcagctacgcgcacagccagagtctgggccggctgatgaatcccctcatcgaccagtacctgtactacttggccagaacacagagcaacgcaggaggtactgctggcaatcgggaactgcagttttatcagggcggacctaccaccatggccgaacaagcaaagaactggctgcccggaccttgcttccggcaacagagagtatccaagacgctggatcaaaataacaacagcaactttgcctggactggtgccacaaaataccatttaaatggaagaaattcattggttaatcccggtgtcgccatggcaacccacaaggacgacgaggaacgcttcttcccttcgagcggagttctaatttttggcaaaactggagcagctaataaaactacattagaaaacgtgctcatgacaaatgaagaagaaattcgtcctaccaacccggtagctaccgaggaatacgggattgtaagcagcaacttgcaggcggctagcaccgcagcccagacacaagttgttaacaaccagggagccttacctggcatggtctggcagaaccgggacgtgtacctgcaaggtcccatttgggccaagattcctcacacggacggcaactttcacccgtctcctctaatgggtggctttggactgaaacacccgcctccccagatcctgatcaaaaacacaccggtacctgctaatcctccagaagtgtttactcctgccaagtttgcttccttcatcacgcagtacagcaccgggcaagtcagcgttgagatcgaatgggagctgcagaaagagaacagcaagcgctggaacccagagattcagtacacctccaactttgacaaacagactggagtggactttgctgttgacagccagggtgtttactctgagcct

SEQ ID NO: 388 - protein, 644 aa, unidentified
  source 1..644: note = Adeno-associated virus
KAYDQQLKAGDNPYLRYNHADAEFQERLQEDTSFGGNLGRAVFQAKKRVLEPLGLVETPAKTAPGKKRPVDSPDSTSGIGKKGQQPAKKRLNFGQTGDSEPVPDPQPIGEPPAGPSGLGSGTMAAGGGAPMADNNEGADGVGNASGNWHCDSTRLGDRVITTSTRTWALPTYNNHLYKQISSQSAGSTNDNVYFGYSTPWGYFDFNRFHCHFSPRDWQRLINNNWGFRPKKLNFKLFNIQVKEVTTNDGVTTIANNLTSTVQVFSDSEYQLPYVLGSAHQGCLPPFPADVFMIPQYGYLTLNNGSQSVGRSSFYCLEYFPSQMLRTGNNFTFSYTFEDVPFHSSYAHSQSLGRLMNPLIDQYLYYLARTQSNAGGTAGNRELQFYQGGPTTMAEQAKNWLPGPCFRQQRVSKTLDQNNNSNFAWTGATKYHLNGRNSLVNPGVAMATHKDDEERFFPSSGVLIFGKTGAANKTTLENVLMTNEEEIRPTNPVATEEYGIVSSNLQAASTAAQTQVVNNQGALPGMVWQNRDVYLQGPIWAKIPHTDGNFHPSPLMGGFGLKHPPPQILIKNTPVPANPPEVFTPAKFASFITQYSTGQVSVEIEWELQKENSKRWNPEIQYTSNFDKQTGVDFAVDSQGVYSEP

SEQ ID NO: 389 - DNA, 1933 bp, unidentified; identical to SEQ ID NO: 387
  source 1..1933: mol_type = unassigned DNA; note = Adeno-associated virus

SEQ ID NO: 390 - protein, 644 aa, unidentified; identical to SEQ ID NO: 388
  source 1..644: note = Adeno-associated virus

SEQ ID NO: 391 - DNA, 1933 bp, unidentified
  source 1..1933: mol_type = unassigned DNA; note = Adeno-associated virus
caaggcctacgaccagcagctcaaagcgggtgacaatccgtacctgcggtataaccacgccgacgccgagtttcaggagcgtcttcaagaagatacgtcttttgggggcaacctcgggcgagcagtcttccaggccaaaaagcgggttctcgaacctcttggtctggttgagacgccagctaagacggcacctggaaagaagcgaccggtagactcgccagactccacctcgggcatcggcaagaaaggccagcagcccgcgaaaaagagactcaactttgggcagactggcgactcagagtcagtccccgaccctcaaccaatcggagaaccaccagcaggcccctctggtctgggatctggtacaatggctgcaggcggtggcgcaccaatggctgacaatagcgagggcgccgacggagtgggtaatgcctcaggaaattggcattgcgattccacatggctgggcgacagagtcatcaccaccagcacccgaacctgggccctgcccacctacaacaaccacctctacaagcaaatctccagtcagtcagcagggagcaccaacgataacgtctatttcggctacagcaccccctgggggtattttgacttcaacagattccattgccacttctcaccacgtgactggcagcgacttatcaacaacaactggggattccggcccaagaagctcaacttcaagctcttcaacatccaggtcaaggaggtcacgacgaatgacggtgtcacaaccatcgctaataaccttaccagcacggttcaggtcttttcggactcggaatatcaactgccgtacgtcctcggctccgcgcaccagggctgcctgcctccgttcccggcagacgtgttcatgattccgcagtacggatacctgactctgaacaatggcagccaatcggtaggccgttcctccttctactgcctggagtactttccttctcagatgctgagaacgggcaacaacttcacctttagctacaccttcgaggacgtgcctttccacagcagctacgcgcacagccagagtctggaccggctgatgaatcccctcatcgaccagtacctgtactacttggccagaacacagagcaacgcaggaggtactgctggcaatcgggaactgcagttttatcagggcggacctaccaccatggccgaacaagcaaagaactggctgcccggaccttgcttccggcaacagagagtatccaagacgctggatcaaaataacaacagcaactttgcctggactggtgccacaaaataccatttaaatggaagaaattcattggttaatcccggtgtcgccatggcaacccacaaggacgacgaggaacgcttcttcccttcgagcggagttctaatttttggcaaaactggagcagctaataaaactacattagaaaacgtgctcatgacaaatgaagaagaaattcgtcctaccaacccggtagctaccgaggaatacgggattgtaagcagcaacttgcaggcggctagcaccgcagcccagacacaagttgttaacaaccagggagccttacctggcatggtctggcagaaccgggacgtgtacctgcaaggtcccatttgggccaagattcctcacacggacggcaactttcacccgtctcctctaatgggtggctttggactgaaacacccgcctccccagatcctgatcaaaaacacaccggtacctgctaatcctccagaagtgtttactcctgccaagcttgcttccttcatcacgcagtacagcaccgggcaagtcagcgttgagatcgagtgggagctgcagaaagagaacagcaagcgctggaacccagagattcagtacacctccaactttgacaaacagactggagtggactttgctgttgacagccagggtgtttactctgagcct

SEQ ID NO: 392 - protein, 644 aa, unidentified
  source 1..644: note = Adeno-associated virus
KAYDQQLKAGDNPYLRYNHADAEFQERLQEDTSFGGNLGRAVFQAKKRVLEPLGLVETPAKTAPGKKRPVDSPDSTSGIGKKGQQPAKKRLNFGQTGDSESVPDPQPIGEPPAGPSGLGSGTMAAGGGAPMADNSEGADGVGNASGNWHCDSTWLGDRVITTSTRTWALPTYNNHLYKQISSQSAGSTNDNVYFGYSTPWGYFDFNRFHCHFSPRDWQRLINNNWGFRPKKLNFKLFNIQVKEVTTNDGVTTIANNLTSTVQVFSDSEYQLPYVLGSAHQGCLPPFPADVFMIPQYGYLTLNNGSQSVGRSSFYCLEYFPSQMLRTGNNFTFSYTFEDVPFHSSYAHSQSLDRLMNPLIDQYLYYLARTQSNAGGTAGNRELQFYQGGPTTMAEQAKNWLPGPCFRQQRVSKTLDQNNNSNFAWTGATKYHLNGRNSLVNPGVAMATHKDDEERFFPSSGVLIFGKTGAANKTTLENVLMTNEEEIRPTNPVATEEYGIVSSNLQAASTAAQTQVVNNQGALPGMVWQNRDVYLQGPIWAKIPHTDGNFHPSPLMGGFGLKHPPPQILIKNTPVPANPPEVFTPAKLASFITQYSTGQVSVEIEWELQKENSKRWNPEIQYTSNFDKQTGVDFAVDSQGVYSEP

SEQ ID NO: 393 - DNA, 1933 bp, unidentified
  source 1..1933: mol_type = unassigned DNA; note = Adeno-associated virus
caaggcctacgaccagcagctcaaagcgggtgacaatccgtacctgcggtataaccacgccgacgccgagtttcaggagcgtcttcaagaagatacgtcttttgggggcaacctcgggcgagcagtcttccaggccaaaaagcgggttctcgaacctcttggtctggttgagacgccagctaagacggcacctggaaagaagcgaccggtagactcgccagactccacctcgggcatcggcaagaaaggccagcagcccgcgaaaaagagactcaactttgggcagactggcgactcagagtcagtccccgaccctcaaccaatcggagaaccaccagcaggcccctctggtctgggatctggtacaatggctgcaggcggtggcgcaccaatggctgacaataacgagggcgccgacggagtgggtaatgcctcaggaaattggcattgcgattccacatggctgggcgacagagtcatcaccaccagcacccgaacctgggccctgcccacctacaacaaccacctctacaagcaaatctccagtcagtcagcagggagcaccaacgataacgtctatttcggctacagcaccccctgggggtattttgacttcaacagattccattgccacttctcaccacgtgactggcagcgacttatcaacaacaactggggattccggcccaagaagctcaacttcaagctcttcaacatccaggtcaaggaggtcacgacgaatgacggcgtcacaaccatcgctaataaccttaccagcacggttcaggtcttttcggacccggaatatcaactgccgtacgtcctcggctccgcgcaccagggctgcctgcctccgttcccggcagacgtgttcatgattccgcagtacggatacctgactctgaacaatggcagccaatcggtaggccgttcctccttctactgcctggagtactttccttctcagatgctgagaacgggcaacaacttcacctttagctacaccttcgaggacgtgcctttccacagcagctacgcgcacagccagagtctggaccggctgatgaatcccctcatcgaccagtacctgtactacttggccagaacacagagcaacgcaggaggtactgctggcaatcgggaactgcagttttatcagggcggacctaccaccatggccgaacaagcaaagaactggctgcccggaccttgcttccggcaacagagagtatccaagacgctggatcaaaataacaacagcaactttgcctggactggtgccacaaaataccatttaaatggaagaaattcattggttaatcccggtgtcgccatggcaacccacaaggacgacgaggaacgcttcttcccttcgagcggagttctaatttttggcaaaactggagcagctaataaaactacattagaaaacgtgctcatgacaaatgaagaagaaattcgtcctaccaacccggtagctaccgaggaatacgggattgtaagcagcaacttgcaggcggctagcaccgcagcccagacacaagttgttaacaaccagggagccttacctggcatggtctggcagaaccgggacgtgtacctgcaaggtcccatttgggccaagattcctcacacggacggcaactttcacccgtctcctctaatgggtggctttggactgaaacacccgcctccccagatcctgatcaaaaacacaccggtacctgctaatcctccagaagtgtttactcctgccaagattgcttccttcatcacgcagtacagcaccgggcaagtcagcgttgagatcgagtgggagctgcagaaagagaacagcaagcgctggaacccagagattcagtacacctccaactttgacaaacagactggagtggactttgctgttgacagccagggtgtttactctgagcct

SEQ ID NO: 394 - protein, 644 aa, unidentified
  source 1..644: note = Adeno-associated virus
KAYDQQLKAGDNPYLRYNHADAEFQERLQEDTSFGGNLGRAVFQAKKRVLEPLGLVETPAKTAPGKKRPVDSPDSTSGIGKKGQQPAKKRLNFGQTGDSESVPDPQPIGEPPAGPSGLGSGTMAAGGGAPMADNNEGADGVGNASGNWHCDSTWLGDRVITTSTRTWALPTYNNHLYKQISSQSAGSTNDNVYFGYSTPWGYFDFNRFHCHFSPRDWQRLINNNWGFRPKKLNFKLFNIQVKEVTTNDGVTTIANNLTSTVQVFSDPEYQLPYVLGSAHQGCLPPFPADVFMIPQYGYLTLNNGSQSVGRSSFYCLEYFPSQMLRTGNNFTFSYTFEDVPFHSSYAHSQSLDRLMNPLIDQYLYYLARTQSNAGGTAGNRELQFYQGGPTTMAEQAKNWLPGPCFRQQRVSKTLDQNNNSNFAWTGATKYHLNGRNSLVNPGVAMATHKDDEERFFPSSGVLIFGKTGAANKTTLENVLMTNEEEIRPTNPVATEEYGIVSSNLQAASTAAQTQVVNNQGALPGMVWQNRDVYLQGPIWAKIPHTDGNFHPSPLMGGFGLKHPPPQILIKNTPVPANPPEVFTPAKIASFITQYSTGQVSVEIEWELQKENSKRWNPEIQYTSNFDKQTGVDFAVDSQGVYSEP

SEQ ID NO: 395 - protein, 738 aa, unidentified
  source 1..738: note = Adeno-associated virus
MAADGYLPDWLEDNLSEGIREWWALKPGAPKPKANQQKQDDGRGLVLPGYKYLGPFNGLDKGEPVNAADAAALEHDKAYDQQLKAGDNPYLRYNHADAEFQERLQEDTSFGGNLGRAVFQAKKRVLEPLGLVEEGAKTAPGKKRPVEPSPQRSPDSTTGIGKKGQQPAKKRLNFGQTGDSESVPDPQPIGEPPAGPSGLGSGTMAAGGGAPMADNNEGADGVGSSSGNWHCDSTWLGDRVITTSTRTWALPTYNNHLYKQISNGTSGGSTNDNTYFGYSTPWGYFDFNRFHCHFSPRDWQRLINNNWGFRPKRLNFKLFNIQVKEVTQNEGTKTIANNLTSTIQVFTDSEYQLPYVLGSARQGCLPPFPADVFMIPQYGYLTLNNGSQAVGRSSFYCLEYFPSQMLRTGNNFEFSYQFEDVPFHSSYAHSQSLDRLMNPLIDQYLYYLSRTQSTGGTAGTQQLLFSQAGPNNMSAQAKNWLPGPCYRQQRVSTTLSQNNNSNFAWTGATKYHLNGRDSLVNPGVAMATHKDDEERFFPSSGVLMFGKQGAGKGNVDYSSVMLTSEEEIKTTNPVATEQYGVVADNLQQQNAAPIVGAVNSQGALPGMVWQNRDVYLQGPIWAKIPHTDGNFHPSPLMGGFGLKHPPPQILIKNTPVPADPPTTFSQAKLASFITQYSTGQVSVEIEWELQKENSKRWNPEIQYTSNYYKSTNVDFAVNTDGTYSEPRPIGTRYLTRNL

SEQ ID NO: 396 - DNA, 3121 bp, unidentified
  source 1..3121: mol_type = unassigned DNA; note = Adeno-associated virus
gaattcgcccttctacggctgcgtcaactggaccaatgagaactttcccttcaacgactgtgtcgacaagatggtgatctggtgggaggaggggaagatgaccgccaaggtcgtggagtcggccaaagccattctcggaggaagcaaggtgcgcgtggaccagaaatgcaagtcctcggcccagatagacccgactcccgtgatcgtcacctccaacaccaacatgtgcgccgtgattgacgggaactcaacgaccttcgaacaccagcagccgttgcaagaccggatgttcaaatttgaactcacccgccgtctggatcatgactttgggaaggtcaccaagcaggaagtcaaagactttttccggtgggcaaaggatcacgtggttgaggtggagcacgaattctacgtcaaaaagggtggagccaagaaaagacccgcccccagtgacgcagatataagtgagcccaaacgggtgcgcgagtcagttgcgcagccatcgacgtcagacgcggaagcttcgatcaactacgcagacaggtaccaaaacaaatgttctcgtcacgcgggcatgaatctgatgctgtttccctgcagacaatgcgagagaatgaatcagaattcaaatatctgcttcactcacggacagaaagactgtttagagtgctttcccgtgtcagaatctcaacccgtttctgtcgtcaaaaaggcgtatcagaaactgtgctacattcatcatatcatgggaaaggtgccagacgcttgcactgcctgcgatctggtcgatgtggatttggatgactgcatctttgaacaataaatgatttaaatcaggtatggctgccgatggttatcttccagattggctcgaggacaacctctctgagggcattcgcgagtggtgggcgctgaaacctggagccccgaagcccaaagccaaccagcaaaagcaggacggcggccggggtctggtgcttcctggctacaagtacctcggacccttcaacggactcgacaagggggagcccgtcaacgcggcggacgcagcggccctcgagcacgacaaggcctacgaccagcagctcaaagcgggtgacaatccgtacctgcggtataaccacgccgacgccgagtttcaggagcgtctgcaagaagatacgtcttttgggggcaacctcgggcgagcagtcttccaggccaagaagcgggttctcgaacctctcggtctggttgaggaaggcgctaagacggctcctggaaagaagagaccggtagagccatcaccccagcgttctccagactcctctacgggcatcggcaagaaaggccagcagcccgcgaaaaagagactcaactttgggcagactggcgactcagagtcagtgcccgaccctcaaccaatcggagaaccccccgcaggcccctctggtctgggatctggtacaatggctgcaggcggtggcgctccaatggcagacaataacgaaggcgccgacggagtgggtagttcctcaggaaattggcattgcgattccacatggctgggcgactgagtcatcaccaccagcacccgaacctgggccctccccacctacaacaaccacctctacaagcaaatctccaacgggacttcgggaggaagcaccaacgacaacacctacttcggctacagcaccccctgggggtattttgactttaacagattccactgccacttctcaccacgtgactggcagcgactcatcaacaacaactggggattccggcccaagagactcaacttcaagctcttcaacatccaggtcaaggaggtcacgcagaatgaaggcaccaagaccatcgccaataaccttaccagcacgattcaggtctttacggactcggaataccagctcccgtacgtcctcggctctgcgcaccagggctgcctgcctccgttcccggcggacgtcttcatgattcctcagtacgggtacctgactctgaacaatggcagtcaggccgtgggccgttcctccttctactgcctggagtactttccttctcaaatgctgagaacgggcaacaactttgagttcagctaccagtttgaggacgtgccttttcacagcagctacgcgcacagccaaagcctggaccggctgatgaaccccctcatcgaccagtacctgtactacctgtctcggactcagtccacgggaggtaccgcaggaactcagcagttgctattttctcaggccgggcctaataacatgtcggctcaggccaaaaactggctacccgggccctgctaccggcagtaacgcgtctccacgacactgtcgcaaaataacaacagcaactttgtctggaccggtgccaccaagtatcatctgaatggcagagactctctggtagatcccggtgtcgctatggcaacccacaaggacgacgaagagcgattttttccgtccagcggagtcataatgtttgggaaacagggagctggaaaagacaacgtggactatagcagcgtcatgctaaccagtgaggaagaaattaaaaccaccaacccagtggccacagaacagtacggcgtggtggccgataacctgcaacagcaaaacgccgctcctattgtaggggccgtcaacagtcaaggagccttacctggcatggtctggcagaaccgggacgtgtacctgcagggtcctacctgggccaagattcctcacacggacggaaactttcatccctcgccgctgatgggaggctttggactgaaacacccgcctcctcagatcctgattaagaatacacctgttcccgcggatcctccaactaccttcagtcaagctaagctggcgtcgttcatcacgcagtacagcaccggacaggtcagcgtggaaattgaatgggagctgcaggaagaaaacagcaaacgctggaacccagagattcaatacacttccaactactacaaatctacaaatgtggactttgctgttaacacagatggcacttattctgagcctcgccccatcggcacccgttacctcacccgtaatctgtaattgcttgttaatcaataaaccggttgattcgtttcagttgaactttggtctctgcgaagggcgaattc

SEQ ID NO: 397 - protein, 738 aa, unidentified
  source 1..738: note = Adeno-associated virus
MAADGYLPDWLEDNLSEGIREWWALKPGAPKPKANQQKQDDGRGLVLPGYKYLGPFNGLDKGEPVNAADAAALEHDKAYDQQLKAGDNPYLRYNHADAEFQERLQEDTSFGGNLGRAVFQAKKRVLEPLGLVEEGAKTAPGKKRPVEPSPQRSPDSSTGIGKKGQQPAKKRLNFGQTGDSESVPDPQPIGEPPAGPSGLGSGTMAAGGGAPMADNNEGADGVGSSSGNWHCDSTWLGDGVITTSTRTWALPTYNNHLYKQISNGTSGGSTNDNTYFGYSTPWGYFDFNRFHCHFSPRDWQRLINNNWGFRPKSLNFKLFNIQVKEVTQNEGTKTIANNLTSTIQVFTDSEYQLPYVLGSAHQGCLPPFPADVFMIPQYGYLTLNNGSQAVGRSSFYCLEYFPSQMLRTGNNFEFSYQFEDVPFHSSYAHSQSLDRLMNPLIDQYLYYLSRTQSTGGTAGTQQLLFSQAGPNNMSAQAKNWLPGPCYRQQRVSTTLSQNDNSNFAWTGATKYHLNGRDSLVNPGVAMATHKDDEERFFPSSGVLMFGKQGAGKDNVDYSSVMLTSEEEIKTTNPVATEQYGVVADNLQQQNAAPIVGAVNSQGALPGMVWQNRDVYLQGPIWAKIPHTDGNFHPSPLMGGFGLKHPPPQILIKNTPVPADPPTTFSQAKLASFITQYSTGQVSVEIEWELQKENSKRWNPEIQYTSNYYKSTNVDFAVNTDGTYSEPRPIGTRYLTRNL

SEQ ID NO: 398 - DNA, 3121 bp, unidentified
  source 1..3121: mol_type = unassigned DNA; note = Adeno-associated virus
gaattcgcccttcgcgagaccaaagttcaactgaaacgaatcaaccggtttattgattaacaagcaattacagattacgggtgaggtaacgggtgccgatggggcgaggctcagaataagtgccatctgtgttaacagcaaagtccacatttgtagatttgtagtagttggaagtgtattgaatctctgggttccagcgtttgctgttttctttctgcagctcccattcaatttccacgctgacctgtccggtgctgtactgcgtgatgaacgacgccagcttagcttgactgaaggtagttggaggatccgcgggaacaggtgtattcttaatcaggatctgaggaggcgggtgtttcagtccaaagcctcccatcagcggcgagggatgaaagtttccgtccgtgtgaggaatcttggcccagataggaccctgcaggtacacgtcccggttctgccagaccatgccaggtaaggctccttgactgttgacggcccctacaataggagcggcgttttgctgttgcaggttatcggccaccacgccgtactgttctgtggccactgggttggtggttttaatttcttcctcactggttagcataacgctgctatagtccacgttgtcttttccagctccctgtttcccaaacattaagactccgctggacggaaaaaatcgctcttcgtcgtccttgtgggttgccatagcgacaccgggatttaccagagagtctctgccattcagatgatacttggtggcaccggtccaggcaaagttgctgttgtcattttgcgacagtgtcgtggagacgcgttgctgccggtagcagggcccgggtagccagtttttggcctgagccgacatgttattaggcccggcctgagaaaatagcaactgctgagttcctgcggtacctcccgtggactgagtccgagacaggtagtacaggtactggtcgatgagggggttcatcagccggtccaggctttggctgtgcgcgtagctgctgtgaaaaggcacgtcctcaaactggtagctgaactcaaagttgttgcccgttctcagcatttgagaaggaaagtactccaggcagtagaaggaggaacggcccacggcctgactgccattgttcagagtcaggtacccgtactgaggaatcatgaagacgtccgccgggaacggaggcaggcagccctggtgcgcagagccgaggacgtacgggagctggtattccgagtccgtaaagacctgaatcgtgctggtaaggttattggcgatggtcttggtgccttcattctgcgtgacctccttgacctggatgttgaagagcttgaagttgaggctcttgggccggaatccccagttgttgttgatgagtcgctgccagtcacgtggtgagaagtggcagtggaatctgttaaagtcaaaatacccccagggggtgctgtagccgaagtaggtgttgtcgttggtgcttcctcccgaagtcccgttggagatttgcttgtagaggtggttgttgtaggtggggagggcccaggttcgggtgctggtggtgatgactccgtcgcccagccatgtggaatcgcaatgccaatttcctgaggaactacccactccgtcggcgccttcgttattgtctgccattggagcgccaccgcctgcagccattgtaccagatcccagaccagaggggcctgcggggggttctccgattggttgagggtcgggcactgactctgagtcgccagtctgcccaaagttgagtctctttttcgcgggctgctggcctttcttgccgatgcccgtagaggagtctggagaacgctggggtgatggctctaccggtctcttctttccaggagccgtcttagcgccttcctcaaccagaccgagaggttcgagaacccgcttcttggcctggaagactgctcgcccgaggttgcccccaaaagacgtatcttcttgcagacgctcctgaaactcggcgtcggcgtggttataccgcaggtacggattgtcacccgctttgagctgctggtcgtaggccttgtcgtgctcgagggccgctgcgtccgccgcgttgacgggctcccccttgtcgagtccgttgaagggtccgaggtacttgtagccaggaagcaccagaccccggccgtcgtcctgcttttgctggttggctttgggcttcggggctccaggtttcagcgcccaccactcgcgaatgccctcagagaggttgtcctcgagccaatctggaagataaccatcggcagccatacctgatttaaatcatttattgttcaaagatgcagtcatccaaatccacattgaccagatcgcaggcagtgcaagcgtctggcacctttcccatgatatgatgaatgtagcacagtttctgatacgcctttttgacgacagaaacgggttgagattctgacacgggaaagcactctaaacagtctttctgtccgtgagtgaagcagatatttgaattctgattcattctctcgcattgtctgcagggaaacagcatcagattcatgcccacgtgacgagaacatttgttttggtacctgtctgcgtagttgatcgaagcttccgcgtctgacgtcgatggctgcgcaactgactcgcgcacccgtttgggctcacttatatctgcgtcactgggggcgggtcttttcttggctccaccctttttgacgtagaattcatgctccacctcaaccacgtgatcctttgcccaccggaaaaagtctttgacttcctgcttggtgaccttcccaaagtcatgatccagacggcgggtgagttcaaatttgaacatccggtcttgcaacggctgctggtgttcgaaggtcgttgagttcccgtcaatcacggcgcacatgttggtgttggaggtgacgatcacgggagtcgggtctatctgggccgaggacttgcatttctggtccacgcgcaccttgcttcctccgagaatggctttggccgactccacgaccttggcggtcatcttcccctcctcccaccagatcaccatcttgtcgacacagtcgttgaagggaaagttctcattggtccagttgacgcagccgtagaaagggcgaattc

SEQ ID NO: 399 - DNA, 2211 bp, unidentified
  source 1..2211: mol_type = unassigned DNA; note = Adeno-associated virus
atggctgctgacggttatcttccagattggctcgaggacaacctttctgaaggcattcgtgagtggtgggctctgaaacctggagtccctcaacccaaagcgaaccaacaacaccaggacaaccgtcggggtcttgtgcttccgggttacaaatacctcggacccggtaacggactcgacaaaggagagccggtcaacgaggcggacgcggcagccctcgaacacgacaaagcttacgaccagcagctcaaggccggtgacaacccgtacctcaagtacaaccacgccgacgccgagtttcaggagcgtcttcaagaagatacgtcttttgggggcaaccttggcagagcagtcttccaggccaaaaagaggatccttgagcctcttggtctggttgaggaagcagctaaaacggctcctggaaagaagggggctgtagatcagtctcctcaggaaccggactcatcatctggtgttggcaaatcgggcaaacagcctgccagaaaaagactaaatttcggtcagactggagactcagagtcagtcccagaccctcaacctctcggagaaccaccagcagcccccacaagtttgggatctaatacaatggcttcaggcggtggcgcaccaatggcagacaataacgagggtgccgatggagtgggtaattcctcaggaaattggcattgcgattcccaatggctgggcgacagagtcatcaccaccagcaccagaacctgggccctgcccacttacaacaaccatctctacaagcaaatctccagccaatcaggagcttcaaacgacaaccactactttggctacagcaccccttgggggtattttgactttaacagattccactgccacttctcaccacgtgactggcagcgactcattaacaacaactggggattccggcccaagaaactcagcttcaagctcttcaacatccaagttagaggggtcacgcagaacgatggcacgacgactattgccaataaccttaccagcacggttcaagtgtttacggactcggagtatcagctcccgtacgtgctcgggtcggcgcaccaaggctgtctcccgccgtttccagcggacgtcttcatggtccctcagtatggatacctcaccctgaacaacggaagtcaagcggtgggacgctcatccttttactgcctggagtacttcccttcgcagatgctaaggactggaaataacttccaattcagctataccttcgaggatgtaccttttcacagcagctacgctcacagccagagtttggatcgcttgatgaatcctcttattgatcagtatctgtactacctgaacagaacgcaaggaacaacctctggaacaaccaaccaatcacggctgctttttagccaggctgggcctcagtctatgtctttgcaggccagaaattggctacctgggccctgctaccggcaacagagactttcaaagactgctaacgacaacaacaacagtaactttccttggacagcggccagcaaatatcatctcaatggccgcgactcgctggtgaatccaggaccagctatggccagtcacaaggacgatgaagaaaaatttttccctatgcacggcaatctaatatttggcaaagaagggacaacggcaagtaacgcagaattagataatgtaatgattacggatgaagaagagattcgtaccaccaatcctgtggcaacagagcagtatggaactgtggcaaataacttgcagagctcaaatacagctcccacgactggaactgtcaatcatcagggggccttacctggcatggtgtggcaagatcgtgacgtgtaccttcaaggacctatctgggcaaagattcctcacacggatggacactttcatccttctcctctgatgggaggctttggactgaaacatccgcctcctcaaatcatgatcaaaaatactccggtaccggcaaatcctccgacgactttcagcccggccaagtttgcttcatttatcactcagtactccactggacaggtcagcgtggaaattgagtgggagctacagaaagaaaacagcaaacgttggaatccagagattcagtacacttccaactacaacaagtctgttaatgtggactttactgtagacactaatggtgtttatagtgaacctcgccctattggaacccggtatctcacacgaaacttgtga

SEQ ID NO: 400 - protein, 736 aa, unidentified
  source 1..736: note = Adeno-associated virus 3
MAADGYLPDWLEDNLSEGIREWWALKPGVPQPKANQQHQDNRRGLVLPGYKYLGPGNGLDKGEPVNEADAAALEHDKAYDQQLKAGDNPYLKYNHADAEFQERLQEDTSFGGNLGRAVFQAKKRILEPLGLVEEAAKTAPGKKGAVDQSPQEPDSSSGVGKSGKQPARKRLNFGQTGDSESVPDPQPLGEPPAAPTSLGSNTMASGGGAPMADNNEGADGVGNSSGNWHCDSQWLGDRVITTSTRTWALPTYNNHLYKQISSQSGASNDNHYFGYSTPWGYFDFNRFHCHFSPRDWQRLINNNWGFRPKKLSFKLFNIQVRGVTQNDGTTTIANNLTSTVQVFTDSEYQLPYVLGSAHQGCLPPFPADVFMVPQYGYLTLNNGSQAVGRSSFYCLEYFPSQMLRTGNNFQFSYTFEDVPFHSSYAHSQSLDRLMNPLIDQYLYYLNRTQGTTSGTTNQSRLLFSQAGPQSMSLQARNWLPGPCYRQQRLSKTANDNNNSNFPWTAASKYHLNGRDSLVNPGPAMASHKDDEEKFFPMHGNLIFGKEGTTASNAELDNVMITDEEEIRTTNPVATEQYGTVANNLQSSNTAPTTGTVNHQGALPGMVWQDRDVYLQGPIWAKIPHTDGHFHPSPLMGGFGLKHPPPQIMIKNTPVPANPPTTFSPAKFASFITQYSTGQVSVEIEWELQKENSKRWNPEIQYTSNYNKSVNVDFTVDTNGVYSEPRPIGTRYLTRNL

SEQ ID NO: 401 - DNA, 4726 bp, unidentified
  source 1..4726: mol_type = unassigned DNA; note = Adeno-associated virus 3
ttggccactccctctatgcgcactcgctcgctcggtggggcctggcgaccaaaggtcgccagacggacgtgctttgcacgtccggccccaccgagcgagcgagtgcgcatagagggagtggccaactccatcactagaggtatggcagtgacgtaacgcgaagcgcgcgaagcgagaccacgcctaccagctgcgtcagcagtcaggtgacccttttgcgacagtttgcgacaccacgtggccgctgagggtatatattctcgagtgagcgaaccaggagctccattttgaccgcgaaatttgaacgagcagcagccatgccggggttctacgagattgtcctgaaggtcccgagtgacctggacgagcgcctgccgggcatttctaactcgtttgttaactgggtggccgagaaggaatgggacgtgccgccggattctgacatggatccgaatctgattgagcaggcacccctgaccgtggccgaaaagcttcagcgcgagttcctggtggagtggcgccgcgtgagtaaggccccggaggccctcttttttgtccagttcgaaaagggggagacctacttccacctgcacgtgctgattgagaccatcggggtcaaatccatggtggtcggccgctacgtgagccagattaaagagaagctggtgacccgcatctaccgcggggtcgagccgcagcttccgaactggttcgcggtgaccaaaacgcgaaatggcgccgggggcgggaacaaggtggtggacgactgctacatccccaactacctgctccccaagacccagcccgagctccagtgggcgtggactaacatggaccagtatttaagcgcctgtttgaatctcgcggagcgtaaacggctggtggcgcagcatctgacgcacgtgtcgcagacgcaggagcagaacaaagagaatcagaaccccaattctgacgcgccggtcatcaggtcaaaaacctcagccaggtacatggagctggtcgggtggctggtggaccgcgggatcacgtcagaaaagcaatggattcaggaggaccaggcctcgtacatctccttcaacgccgcctccaactcgcggtcccagatcaaggccgcgctggacaatgcctccaagatcatgagcctgacaaagacggctccggactacctggtgggcagcaacccgccggaggacattaccaaaaatcggatctaccaaatcctggagctgaacgggtacgatccgcagtacgcggcctccgtcttcctgggctgggcgcaaaagaagttcgggaagaggaacaccatctggctctttgggccggccacgacgggtaaaaccaacatcgcggaagccatcgcccacgccgtgcccttctacggctgcgtaaactggaccaatgagaactttcccttcaacgattgcgtcgacaagatggtgatctggtgggaggagggcaagatgacggccaaggtcgtggagagcgccaaggccattctgggcggaagcaaggtgcgcgtggaccaaaagtgcaagtcatcggcccagatcgaacccactcccgtgatcgtcacctccaacaccaacatgtgcgccgtgattgacgggaacagcaccaccttcgagcatcagcagccgctgcaggaccggatgtttgaatttgaacttacccgccgtttggaccatgactttgggaaggtcaccaaacaggaagtaaaggactttttccggtgggcttccgatcacgtgactgacgtggctcatgagttctacgtcagaaagggtggagctaagaaacgccccgcctccaatgacgcggatgtaagcgagccaaaacgggagtgcacgtcacttgcgcagccgacaacgtcagacgcggaagcaccggcggactacgcggacaggtaccaaaacaaatgttctcgtcacgtgggcatgaatctgatgctttttccctgtaaaacatgcgagagaatgaatcaaatttccaatgtctgttttacgcatggtcaaagagactgtggggaatgcttccctggaatgtcagaatctcaacccgtttctgtcgtcaaaaagaagacttatcagaaactgtgtccaattcatcatatcctgggaagggcacccgagattgcctgttcggcctgcgatttggccaatgtggacttggatgactgtgtttctgagcaataaatgacttaaaccaggtatggctgctgacggttatcttccagattggctcgaggacaacctttctgaaggcattcgtgagtggtgggctctgaaacctggagtccctcaacccaaagcgaaccaacaacaccaggacaaccgtcggggtcttgtgcttccgggttacaaatacctcggacccggtaacggactcgacaaaggagagccggtcaacgaggcggacgcggcagccctcgaacacgacaaagcttacgaccagcagctcaaggccggtgacaacccgtacctcaagtacaaccacgccgacgccgagtttcaggagcgtcttcaagaagatacgtcttttgggggcaaccttggcagagcagtcttccaggccaaaaagaggatccttgagcctcttggtctggttgaggaagcagctaaaacggctcctggaaagaagggggctgtagatcagtctcctcaggaaccggactcatcatctggtgttggcaaatcgggcaaacagcctgccagaaaaagactaaatttcggtcagactggagactcagagtcagtcccagaccctcaacctctcggagaaccaccagcagcccccacaagtttgggatctaatacaatggcttcaggcggtggcgcaccaatggcagacaataacgagggtgccgatggagtgggtaattcctcaggaaattggcattgcgattcccaatggctgggcgacagagtcatcaccaccagcaccagaacctgggccctgcccacttacaacaaccatctctacaagcaaatctccagccaatcaggagcttcaaacgacaaccactactttggctacagcaccccttgggggtattttgactttaacagattccactgccacttctcaccacgtgactggcagcgactcattaacaacaactggggattccggcccaagaaactcagcttcaagctcttcaacatccaagttagaggggtcacgcagaacgatggcacgacgactattgccaataaccttaccagcacggttcaagtgtttacggactcggagtatcagctcccgtacgtgctcgggtcggcgcaccaaggctgtctcccgccgtttccagcggacgtcttcatggtccctcagtatggatacctcaccctgaacaacggaagtcaagcggtgggacgctcatccttttactgcctggagtacttcccttcgcagatgctaaggactggaaataacttccaattcagctataccttcgaggatgtaccttttcacagcagctacgctcacagccagagtttggatcgcttgatgaatcctcttattgatcagtatctgtactacctgaacagaacgcaaggaacaacctctggaacaaccaaccaatcacggctgctttttagccaggctgggcctcagtctatgtctttgcaggccagaaattggctacctgggccctgctaccggcaacagagactttcaaagactgctaacgacaacaacaacagtaactttccttggacagcggccagcaaatatcatctcaatggccgcgactcgctggtgaatccaggaccagctatggccagtcacaaggacgatgaagaaaaatttttccctatgcacggcaatctaatatttggcaaagaagggacaacggcaagtaacgcagaattagataatgtaatgattacggatgaagaagagattcgtaccaccaatcctgtggcaacagagcagtatggaactgtggcaaataacttgcagagctcaaatacagctcccacgactggaactgtcaatcatcagggggccttacctggcatggtgtggcaagatcgtgacgtgtaccttcaaggacctatctgggcaaagattcctcacacggatggacactttcatccttctcctctgatgggaggctttggactgaaacatccgcctcctcaaatcatgatcaaaaatactccggtaccggcaaatcctccgacgactttcagcccggccaagtttgcttcatttatcactcagtactccactggacaggtcagcgtggaaattgagtgggagctacagaaagaaaacagcaaacgttggaatccagagattcagtacacttccaactacaacaagtctgttaatgtggactttactgtagacactaatggtgtttatagtgaacctcgccctattggaacccggtatctcacacgaaacttgtgaatcctggttaatcaataaaccgtttaattcgtttcagttgaactttggctcttgtgcacttctttatctttatcttgtttccatggctactgcgtagataagcagcggcctgcggcgcttgcgcttcgcggtttacaactgctggttaatatttaactctcgccatacctctagtgatggagttggccactccctctatgcgcactcgctcgctcggtggggcctggcgaccaaaggtcgccagacggacgtgctttgcacgtccggccccaccgagcgagcgagtgcgcatagagggagtggccaa

SEQ ID NO: 402 - protein, 737 aa, unidentified
  source 1..737: note = Adeno-associated virus
MAADGYLPDWLEDNLSEGIREWWDLKPGAPKPKANQQKQDNGRGLVLPGYKYLGPFNGLDKGEPVNAADAAALEHDKAYDQQLNAGDNPYLRYNHADAEFQERLQEDTSFGGNLGRAVFQAKKRVLEPLGLVEEGAKTAPAKKRPVEPSPQRSPDSSTGIGKKGQQPARKRLNFGQTGDSESVPDPQPLGEPPAAPSSVGSGTVAAGGGAPMADNNEGADGVGNASGNWHCDSTWLGDRVITTSTRTWALPTYNNHLYEQISSETAGSTNDNTYFGYSTPWGYFDFNRFHCHFSPRDWQRLINNNWGFRPKKLRFKLFNIQVKEVTTNDGVTTIANNLTSTIQVFSDSEYQLPYVLGSAHQGCLPPFPADVFMIPQYGYLTLNNGSQSVGRSSFYCLEYFPSQMLRTGNNFEFSYSFEDVPFHSSYAHSQSLDRLMNPLIDQYLYYLARTQSDPGGTAGNRELQFYQGGPSTMAEQAKNWLPGPCFRQQRVSKTLDQNNNSNFAWTGATKYHLNGRNSLVNPGVAMATHKDDEDRFFPSSGVLIFGKTGATNKTTLENVLMTNEEEIRPTNPVATEEYGIVSSNLQAANTAAQTQVVNNQGALPGMVWQNRDVYLQGPIWAKIPHTDGNFHPSPLMGGFGLKHPPPQILIKNTPVPANPPEVFTPAKFASFITQYSTGQVSVEIEWELQKENSKRWDPEIQYTSNFEKQTGVDFAVDSQGVYSEPRPIGTRYLTRNL

SEQ ID NO: 403 - DNA, 2211 bp, unidentified
  source 1..2211: mol_type = unassigned DNA; note = Adeno-associated virus
atggctgctgacggttatcttccagattggctcgaggacaacctttctgaaggcattcgtgagtggtgggctctgaaacctggagtccctcaacccaaagcgaaccaacaacaccaggacaaccgtcggggtcttgtgcttccgggttacaaatacctcggacccggtaacggactcgacaaaggagagccggtcaacgaggcggacgcggcagccctcgaacacgacaaagcttacgaccagcagctcaaggccggtgacaacccgtacctcaagtacaaccacgccgacgccgagtttcaggagcgtcttcaagaagatacgtcttttgggggcaaccttggcagagcagtcttccaggccaaaaagaggatccttgagcctcttggtctggttgaggaagcagctaaaacggctcctggaaagaagggggctgtagatcagtctcctcaggaaccggactcatcatctggtgttggcaaatcgggcaaacagcctgccagaaaaagactaaatttcggtcagactggagactcagagtcagtcccagaccctcaacctctcggagaaccaccagcagcccccacaagtttgggatctaatacaatggcttcaggcggtggcgcaccaatggcagacaataacgagggtgccgatggagtgggtaattcctcaggaaattggcattgcgattcccaatggctgggcgacagagtcatcaccaccagcaccagaacctgggccctgcccacttacaacaaccatctctacaagcaaatctccagccaatcaggagcttcaaacgacaaccactactttggctacagcaccccttgggggtattttgactttaacagattccactgccacttctcaccacgtgactggcagcgactcattaacaacaactggggattccggcccaagaaactcagcttcaagctcttcaacatccaagttagaggggtcacgcagaacgatggcacgacgactattgccaataaccttaccagcacggttcaagtgtttacggactcggagtatcagctcccgtacgtgctcgggtcggcgcaccaaggctgtctcccgccgtttccagcggacgtcttcatggtccctcagtatggatacctcaccctgaacaacggaagtcaagcggtgggacgctcatccttttactgcctggagtacttcccttcgcagatgctaaggactggaaataacttccaattcagctataccttcgaggatgtaccttttcacagcagctacgctcacagccagagtttggatcgcttgatgaatcctcttattgatcagtatctgtactacctgaacagaacgcaaggaacaacctctggaacaaccaaccaatcacggctgctttttagccaggctgggcctcagtctatgtctttgcaggccagaaattggctacctgggccctgctaccggcaacagagactttcaaagactgctaacgacaacaacaacagtaactttccttggacagcggccagcaaatatcatctcaatggccgcgactcgctggtgaatccaggaccagctatggccagtcacaaggacgatgaagaaaaatttttccctatgcacggcaatctaatatttggcaaagaagggacaacggcaagtaacgcagaattagataatgtaatgattacggatgaagaagagattcgtaccaccaatcctgtggcaacagagcagtatggaactgtggcaaataacttgcagagctcaaatacagctcccacgactggaactgtcaatcatcagggggccttacctggcatggtgtggcaagatcgtgacgtgtaccttcaaggacctatctgggcaaagattcctcacacggatggacactttcatccttctcctctgatgggaggctttggactgaaacatccgcctcctcaaatcatgatcaaaaatactccggtaccggcaaatcctccgacgactttcagcccggccaagtttgcttcatttatcactcagtactccactggacaggtcagcgtggaaattgagtgggagctacagaaagaaaacagcaaacgttggaatccagagattcagtacacttccaactacaacaagtctgttaatgtggactttactgtagacactaatggtgtttatagtgaacctcgccctattggaacccggtatctcacacgaaacttgtaa

SEQ ID NO: 404 - protein, 736 aa, unidentified; identical to SEQ ID NO: 400
  source 1..736: note = Adeno-associated virus

SEQ ID NO: 405 - protein, 736 aa, unidentified; identical to SEQ ID NO: 400
  source 1..736: note = Adeno-associated virus 3A

SEQ ID NO: 406 - protein, 624 aa, unidentified
  source 1..624: note = Adeno-associated virus 3A
MPGFYEIVLKVPSDLDERLPGISNSFVNWVAEKEWDVPPDSDMDPNLIEQAPLTVAEKLQREFLVEWRRVSKAPEALFFVQFEKGETYFHLHVLIETIGVKSMVVGRYVSQIKEKLVTRIYRGVEPQLPNWFAVTKTRNGAGGGNKVVDDCYIPNYLLPKTQPELQWAWTNMDQYLSACLNLAERKRLVAQHLTHVSQTQEQNKENQNPNSDAPVIRSKTSARYMELVGWLVDRGITSEKQWIQEDQASYISFNAASNSRSQIKAALDNASKIMSLTKTAPDYLVGSNPPEDITKNRIYQILELNGYDPQYAASVFLGWAQKKFGKRNTIWLFGPATTGKTNIAEAIAHAVPFYGCVNWTNENFPFNDCVDKMVIWWEEGKMTAKVVESAKAILGGSKVRVDQKCKSSAQIEPTPVIVTSNTNMCAVIDGNSTTFEHQQPLQDRMFEFELTRRLDHDFGKVTKQEVKDFFRWASDHVTDVAHEFYVRKGGAKKRPASNDADVSEPKRECTSLAQPTTSDAEAPADYADRYQNKCSRHVGMNLMLFPCKTCERMNQISNVCFTHGQRDCGECFPGMSESQPVSVVKKKTYQKLCPIHHILGRAPEIACSACDLANVDLDDCVSEQ

SEQ ID NO: 407 - protein, 736 aa, unidentified
  source 1..736: note = Adeno-associated virus 3B
MAADGYLPDWLEDNLSEGIREWWALKPGVPQPKANQQHQDNRRGLVLPGYKYLGPGNGLDKGEPVNEADAAALEHDKAYDQQLKAGDNPYLKYNHADAEFQERLQEDTSFGGNLGRAVFQAKKRILEPLGLVEEAAKTAPGKKRPVDQSPQEPDSSSGVGKSGKQPARKRLNFGQTGDSESVPDPQPLGEPPAAPTSLGSNTMASGGGAPMADNNEGADGVGNSSGNWHCDSQWLGDRVITTSTRTWALPTYNNHLYKQISSQSGASNDNHYFGYSTPWGYFDFNRFHCHFSPRDWQRLINNNWGFRPKKLSFKLFNIQVKEVTQNDGTTTIANNLTSTVQVFTDSEYQLPYVLGSAHQGCLPPFPADVFMVPQYGYLTLNNGSQAVGRSSFYCLEYFPSQMLRTGNNFQFSYTFEDVPFHSSYAHSQSLDRLMNPLIDQYLYYLNRTQGTTSGTTNQSRLLFSQAGPQSMSLQARNWLPGPCYRQQRLSKTANDNNNSNFPWTAASKYHLNGRDSLVNPGPAMASHKDDEEKFFPMHGNLIFGKEGTTASNAELDNVMITDEEEIRTTNPVATEQYGTVANNLQSSNTAPTTRTVNDQGALPGMVWQDRDVYLQGPIWAKIPHTDGHFHPSPLMGGFGLKHPPPQIMIKNTPVPANPPTTFSPAKFASFITQYSTGQVSVEIEWELQKENSKRWNPEIQYTSNYNKSVNVDFTVDTNGVYSEPRPIGTRYLTRNL

SEQ ID NO: 408 - protein, 624 aa, unidentified
  source 1..624: note = Adeno-associated virus 3B
MPGFYEIVLKVPSDLDEHLPGISNSFVNWVAEKEWELPPDSDMDPNLIEQAPLTVAEKLQREFLVEWRRVSKAPEALFFVQFEKGETYFHLHVLIETIGVKSMVVGRYVSQIKEKLVTRIYRGVEPQLPNWFAVTKTRNGAGGGNKVVDDCYIPNYLLPKTQPELQWAWTNMDQYLSACLNLAERKRLVAQHLTHVSQTQEQNKENQNPNSDAPVIRSKTSARYMELVGWLVDRGITSEKQWIQEDQASYISFNAASNSRSQIKAALDNASKIMSLTKTAPDYLVGSNPPEDITKNRIYQILELNGYDPQYAASVFLGWAQKKFGKRNTIWLFGPATTGKTNIAEAIAHAVPFYGCVNWTNENFPFNDCVDKMVIWWEEGKMTAKVVESAKAILGGSKVRVDQKCKSSAQIEPTPVIVTSNTNMCAVIDGNSTTFEHQQPLQDRMFKFELTRRLDHDFGKVTKQEVKDFFRWASDHVTDVAHEFYVRKGGAKKRPASNDADVSEPKRQCTSLAQPTTSDAEAPADYADRYQNKCSRHVGMNLMLFPCKTCERMNQISNVCFTHGQRDCGECFPGMSESQPVSVVKKKTYQKLCPIHHILGRAPEIACSACDLANVDLDDCVSEQ

SEQ ID NO: 409 - DNA, 4722 bp, unidentified
  source 1..4722: mol_type = unassigned DNA; note = Adeno-associated virus 3B
tggccactccctctatgcgcactcgctcgctcggtggggcctggcgaccaaaggtcgccagacggacgtgctttgcacgtccggccccaccgagcgagcgagtgcgcatagagggagtggccaactccatcactagaggtatggcagtgacgtaacgcgaagcgcgcgaagcgagaccacgcctaccagctgcgtcagcagtcaggtgacccttttgcgacagtttgcgacaccacgtggccgctgagggtatatattctcgagtgagcgaaccaggagctccattttgaccgcgaaatttgaacgagcagcagccatgccggggttctacgagattgtcctgaaggtcccgagtgacctggacgagcacctgccgggcatttctaactcgtttgttaactgggtggccgagaaggaatgggagctgccgccggattctgacatggatccgaatctgattgagcaggcacccctgaccgtggccgaaaagcttcagcgcgagttcctggtggagtggcgccgcgtgagtaaggccccggaggccctcttttttgtccagttcgaaaagggggagacctacttccacctgcacgtgctgattgagaccatcggggtcaaatccatggtggtcggccgctacgtgagccagattaaagagaagctggtgacccgcatctaccgcggggtcgagccgcagcttccgaactggttcgcggtgaccaaaacgcgaaatggcgccgggggcgggaacaaggtggtggacgactgctacatccccaactacctgctccccaagacccagcccgagctccagtgggcgtggactaacatggaccagtatttaagcgcctgtttgaatctcgcggagcgtaaacggctggtggcgcagcatctgacgcacgtgtcgcagacgcaggagcagaacaaagagaatcagaaccccaattctgacgcgccggtcatcaggtcaaaaacctcagccaggtacatggagctggtcgggtggctggtggaccgcgggatcacgtcagaaaagcaatggattcaggaggaccaggcctcgtacatctccttcaacgccgcctccaactcgcggtcccagatcaaggccgcgctggacaatgcctccaagatcatgagcctgacaaagacggctccggactacctggtgggcagcaacccgccggaggacattaccaaaaatcggatctaccaaatcctggagctgaacgggtacgatccgcagtacgcggcctccgtcttcctgggctgggcgcaaaagaagttcgggaagaggaacaccatctggctctttgggccggccacgacgggtaaaaccaacatcgcggaagccatcgcccacgccgtgcccttctacggctgcgtaaactggaccaatgagaactttcccttcaacgattgcgtcgacaagatggtgatctggtgggaggagggcaagatgacggccaaggtcgtggagagcgccaaggccattctgggcggaagcaaggtgcgcgtggaccaaaagtgcaagtcatcggcccagatcgaacccactcccgtgatcgtcacctccaacaccaacatgtgcgccgtgattgacgggaacagcaccaccttcgagcatcagcagccgctgcaggaccggatgtttaaatttgaacttacccgccgtttggaccatgactttgggaaggtcaccaaacaggaagtaaaggactttttccggtgggcttccgatcacgtgactgacgtggctcatgagttctacgtcagaaagggtggagctaagaaacgccccgcctccaatgacgcggatgtaagcgagccaaaacggcagtgcacgtcacttgcgcagccgacaacgtcagacgcggaagcaccggcggactacgcggacaggtaccaaaacaaatgttctcgtcacgtgggcatgaatctgatgctttttccctgtaaaacatgcgagagaatgaatcaaatttccaatgtctgttttacgcatggtcaaagagactgtggggaatgcttccctggaatgtcagaatctcaacccgtttctgtcgtcaaaaagaagacttatcagaaactgtgtccaattcatcatatcctgggaagggcacccgagattgcctgttcggcctgcgatttggccaatgtggacttggatgactgtgtttctgagcaataaatgacttaaaccaggtatggctgctgacggttatcttccagattggctcgaggacaacctttctgaaggcattcgtgagtggtgggctctgaaacctggagtccctcaacccaaagcgaaccaacaacaccaggacaaccgtcggggtcttgtgcttccgggttacaaatacctcggacccggtaacggactcgacaaaggagagccggtcaacgaggcggacgcggcagccctcgaacacgacaaagcttacgaccagcagctcaaggccggtgacaacccgtacctcaagtacaaccacgccgacgccgagtttcaggagcgtcttcaagaagatacgtcttttgggggcaaccttggcagagcagtcttccaggccaaaaagaggatccttgagcctcttggtctggttgaggaagcagctaaaacggctcctggaaagaagaggcctgtagatcagtctcctcaggaaccggactcatcatctggtgttggcaaatcgggcaaacagcctgccagaaaaagactaaatttcggtcagactggcgactcagagtcagtcccagaccctcaacctctcggagaaccaccagcagcccccacaagtttgggatctaatacaatggcttcaggcggtggcgcaccaatggcagacaataacgagggtgccgatggagtgggtaattcctcaggaaattggcattgcgattcccaatggctgggcgacagagtcatcaccaccagcaccagaacctgggccctgcccacttacaacaaccatctctacaagcaaatctccagccaatcaggagcttcaaacgacaaccactactttggctacagcaccccttgggggtattttgactttaacagattccactgccacttctcaccacgtgactggcagcgactcattaacaacaactggggattccggcccaagaaactcagcttcaagctcttcaacatccaagttaaagaggtcacgcagaacgatggcacgacgactattgccaataaccttaccagcacggttcaagtgtttacggactcggagtatcagctcccgtacgtgctcgggtcggcgcaccaaggctgtctcccgccgtttccagcggacgtcttcatggtccctcagtatggatacctcaccctgaacaacggaagtcaagcggtgggacgctcatccttttactgcctggagtacttcccttcgcagatgctaaggactggaaataacttccaattcagctataccttcgaggatgtaccttttcacagcagctacgctcacagccagagtttggatcgcttgatgaatcctcttattgatcagtatctgtactacctgaacagaacgcaaggaacaacctctggaacaaccaaccaatcacggctgctttttagccaggctgggcctcagtctatgtctttgcaggccagaaattggctacctgggccctgctaccggcaacagagactttcaaagactgctaacgacaacaacaacagtaactttccttggacagcggccagcaaatatcatctcaatggccgcgactcgctggtgaatccaggaccagctatggccagtcacaaggacgatgaagaaaaatttttccctatgcacggcaatctaatatttggcaaagaagggacaacggcaagtaacgcagaattagataatgtaatgattacggatgaagaagagattcgtaccaccaatcctgtggcaacagagcagtatggaactgtggcaaataacttgcagagctcaaatacagctcccacgactagaactgtcaatgatcagggggccttacctggcatggtgtggcaagatcgtgacgtgtaccttcaaggacctatctgggcaaagattcctcacacggatggacactttcatccttctcctctgatgggaggctttggactgaaacatccgcctcctcaaatcatgatcaaaaatactccggtaccggcaaatcctccgacgactttcagcccggccaagtttgcttcatttatcactcagtactccactggacaggtcagcgtggaaattgagtgggagctacagaaagaaaacagcaaacgttggaatccagagattcagtacacttccaactacaacaagtctgttaatgtggactttactgtagacactaatggtgtttatagtgaacctcgccctattggaacccggtatctcacacgaaacttgtaatcctggttaatcaataaaccgtttaattcgtttcagttgaactttggctcttgtgcacttcttatcttatcttgtttccatggctactgcgtagataagcagcggcctgcggcgcttgcgcttcgcggtttacaactgctggttaatatttaactctcgccatacctctagtgatggagttggccactccctctatgcgcactcgctcgctcggtggggccggacgtgcaaagcacgtccgtctggcgacctttggtcgccaggccccaccgagcgagcgagtgcgcatagagggagtggccaa

SEQ ID NO: 410 - DNA, 1800 bp, unidentified
  source 1..1800: mol_type = unassigned DNA; note = Adeno-associated virus 4
  misc_difference 342: note = modified_base - a, c, t, or g
acggctcctggaaagaagagaccgttgattgaatccccccagcagcccgactcctccacgggtatcggcaaaaaaggcaagcagccggctaaaaagaagctcgttttcgaagacgaaactggagcaggcgacggaccccctgagggatcaacttccggagccatgtctgatgacagtgagatgcgtgcagcagctggcggagctgcagtcgagggsggacaaggtgccgatggagtgggtaatgcctcgggtgattggcattgcgattccacctggtctgagggccacgtcacgaccaccagcaccagaacctgggtcttgcccacctacaacaaccacctntacaagcgactcggagagagcctgcagtccaacacctacaacggattctccaccccctggggatactttgacttcaaccgcttccactgccacttctcaccacgtgactggcagcgactcatcaacaacaactggggcatgcgacccaaagccatgcgggtcaaaatcttcaacatccaggtcaaggaggtcacgacgtcgaacggcgagacaacggtggctaataaccttaccagcacggttcagatctttgcggactcgtcgtacgaactgccgtacgtgatggatgcgggtcaagagggcagcctgcctccttttcccaacgacgtctttatggtgccccagtacggctactgtggactggtgaccggcaacacttcgcagcaacagactgacagaaatgccttctactgcctggagtactttccttcgcagatgctgcggactggcaacaactttgaaattacgtacagttttgagaaggtgcctttccactcgatgtacgcgcacagccagagcctggaccggctgatgaaccctctcatcgaccagtacctgtggggactgcaatcgaccaccaccggaaccaccctgaatgccgggactgccaccaccaactttaccaagctgcggcctaccaacttttccaactttaaaaagaactggctgcccgggccttcaatcaagcagcagggcttctcaaagactgccaatcaaaactacaagatccctgccaccgggtcagacagtctcatcaaatacgagacgcacagcactctggacggaagatggagtgccctgacccccggacctccaatggccacggctggacctgcggacagcaagttcagcaacagccagctcatctttgcggggcctaaacagaacggcaacacggccaccgtacccgggactctgatcttcacctctgaggaggagctggcagccaccaacgccaccgatacggacatgtggggcaacctacctggcggtgaccagagcaacagcaacctgccgaccgtggacagactgacagccttgggagccgtgcctggaatggtctggcaaaacagagacatttactaccagggtcccatttgggccaagattcctcataccgatggacactttcacccctcaccgctgattggtgggtttgggctgaaacacccgcctcctcaaatttttatcaagaacaccccggtacctgcgaatcctgcaacgaccttcagctctactccggtaaactccttcattactcagtacagcactggccaggtgtcggtgcagattgactgggagatccagaaggagcggtccaaacgctggaaccccgaggtccagtttacctccaactacggacagcaaaactctctgttgtgggctcccgatgcggctgggaaatacactgagcctagggctatcggtacccgctacctcacccaccacctgtaataa

SEQ ID NO: 411 - DNA, 2208 bp, unidentified
  source 1..2208: mol_type = unassigned DNA; note = Adeno-associated virus 4
  misc_difference 750: note = modified_base - a, c, t, or g
atgactgacggttaccttccagattggctagaggacaacctctctgaaggcgttcgagagtggtgggcgctgcaacctggagcccctaaacccaaggcaaatcaacaacatcaggacaacgctcggggtcttgtgcttccgggttacaaatacctcggacccggcaacggactcgacaagggggaacccgtcaacgcagcggacgcggcagccctcgagcacgacaaggcctacgaccagcagctcaaggccggtgacaacccctacctcaagtacaaccacgccgacgcggagttccagcagcggcttcagggcgacacatcgtttgggggcaacctcggcagagcagtcttccaggccaaaaagagggttcttgaacctcttggtctggttgagcaagcgggtgagacggctcctggaaagaagagaccgttgattgaatccccccagcagcccgactcctccacgggtatcggcaaaaaaggcaagcagccggctaaaaagaagctcgttttcgaagacgaaactggagcaggcgacggaccccctgagggatcaacttccggagccatgtctgatgacagtgagatgcgtgcagcagctggcggagctgcagtcgagggsggacaaggtgccgatggagtgggtaatgcctcgggtgattggcattgcgattccacctggtctgagggccacgtcacgaccaccagcaccagaacctgggtcttgcccacctacaacaaccacctntacaagcgactcggagagagcctgcagtccaacacctacaacggattctccaccccctggggatactttgacttcaaccgcttccactgccacttctcaccacgtgactggcagcgactcatcaacaacaactggggcatgcgacccaaagccatgcgggtcaaaatcttcaacatccaggtcaaggaggtcacgacgtcgaacggcgagacaacggtggctaataaccttaccagcacggttcagatctttgcggactcgtcgtacgaactgccgtacgtgatggatgcgggtcaagagggcagcctgcctccttttcccaacgacgtctttatggtgccccagtacggctactgtggactggtgaccggcaacacttcgcagcaacagactgacagaaatgccttctactgcctggagtactttccttcgcagatgctgcggactggcaacaactttgaaattacgtacagttttgagaaggtgcctttccactcgatgtacgcgcacagccagagcctggaccggctgatgaaccctctcatcgaccagtacctgtggggactgcaatcgaccaccaccggaaccaccctgaatgccgggactgccaccaccaactttaccaagctgcggcctaccaacttttccaactttaaaaagaactggctgcccgggccttcaatcaagcagcagggcttctcaaagactgccaatcaaaactacaagatccctgccaccgggtcagacagtctcatcaaatacgagacgcacagcactctggacggaagatggagtgccctgacccccggacctccaatggccacggctggacctgcggacagcaagttcagcaacagccagctcatctttgcggggcctaaacagaacggcaacacggccaccgtacccgggactctgatcttcacctctgaggaggagctggcagccaccaacgccaccgatacggacatgtggggcaacctacctggcggtgaccagagcaacagcaacctgccgaccgtggacagactgacagccttgggagccgtgcctggaatggtctggcaaaacagagacatttactaccagggtcccatttgggccaagattcctcataccgatggacactttcacccctcaccgctgattggtgggtttgggctgaaacacccgcctcctcaaatttttatcaagaacaccccggtacctgcgaatcctgcaacgaccttcagctctactccggtaaactccttcattactcagtacagcactggccaggtgtcggtgcagattgactgggagatccagaaggagcggtccaaacgctggaaccccgaggtccagtttacctccaactacggacagcaaaactctctgttgtgggctcccgatgcggctgggaaatacactgagcctagggctatcggtacccgctacctcacccaccacctgtaataa

SEQ ID NO: 412 - DNA, 1872 bp, unidentified
  source 1..1872: mol_type = unassigned DNA; note = Adeno-associated virus 4
atgccggggttctacgagatcgtgctgaaggtgcccagcgacctggacgagcacctgcccggcatttctgactcttttgtgagctgggtggccgagaaggaatgggagctgccgccggattctgacatggacttgaatctgattgagcaggcacccctgaccgtggccgaaaagctgcaacgcgagttcctggtcgagtggcgccgcgtgagtaaggccccggaggccctcttctttgtccagttcgagaagggggacagctacttccacctgcacatcctggtggagaccgtgggcgtcaaatccatggtggtgggccgctacgtgagccagattaaagagaagctggtgacccgcatctaccgcggggtcgagccgcagcttccgaactggttcgcggtgaccaagacgcgtaatggcgccggaggcgggaacaaggtggtggacgactgctacatccccaactacctgctccccaagacccagcccgagctccagtgggcgtggactaacatggaccagtatataagcgcctgtttgaatctcgcggagcgtaaacggctggtggcgcagcatctgacgcacgtgtcgcagacgcaggagcagaacaaggaaaaccagaaccccaattctgacgcgccggtcatcaggtcaaaaacctccgccaggtacatggagctggtcgggtggctggtggaccgcgggatcacgtcagaaaagcaatggatccaggaggaccaggcgtcctacatctccttcaacgccgcctccaactcgcggtcacaaatcaaggccgcgctggacaatgcctccaaaatcatgagcctgacaaagacggctccggactacctggtgggccagaacccgccggaggacatttccagcaaccgcatctaccgaatcctcgagatgaacgggtacgatccgcagtacgcggcctccgtcttcctgggctgggcgcaaaagaagttcgggaagaggaacaccatctggctctttgggccggccacgacgggtaaaaccaacatcgcggaagccatcgcccacgccgtgcccttctacggctgcgtgaactggaccaatgagaactttccgttcaacgattgcgtcgacaagatggtgatctggtgggaggagggcaagatgacggccaaggtcgtagagagcgccaaggccatcctgggcggaagcaaggtgcgcgtggaccaaaagtgcaagtcatcggcccagatcgacccaactcccgtgatcgtcacctccaacaccaacatgtgcgcggtcatcgacggaaactcgaccaccttcgagcaccaacaaccactccaggaccggatgttcaagttcgagctcaccaagcgcctggagcacgactttggcaaggtcaccaagcaggaagtcaaagactttttccggtgggcgtcagatcacgtgaccgaggtgactcacgagttttacgtcagaaagggtggagctagaaagaggcccgcccccaatgacgcagatataagtgagcccaagcgggcctgtccgtcagttgcgcagccatcgacgtcagacgcggaagctccggtggactacgcggacaggtaccaaaacaaatgttctcgtcacgtgggtatgaatctgatgctttttccctgccggcaatgcgagagaatgaatcagaatgtggacatttgcttcacgcacggggtcatggactgtgccgagtgcttccccgtgtcagaatctcaacccgtgtctgtcgtcagaaagcggacgtatcagaaactgtgtccgattcatcacatcatggggagggcgcccgaggtggcctgctcggcctgcgaactggccaatgtggacttggatgactgtgacatggaacaataa

SEQ ID NO: 413 - DNA, 1611 bp, unidentified
  source 1..1611: mol_type = unassigned DNA; note = Adeno-associated virus 4
atgccggggttctacgagatcgtgctgaaggtgcccagcgacctggacgagcacctgcccggcatttctgactcttttgtgagctgggtggccgagaaggaatgggagctgccgccggattctgacatggacttgaatctgattgagcaggcacccctgaccgtggccgaaaagctgcaacgcgagttcctggtcgagtggcgccgcgtgagtaaggccccggaggccctcttctttgtccagttcgagaagggggacagctacttccacctgcacatcctggtggagaccgtgggcgtcaaatccatggtggtgggccgctacgtgagccagattaaagagaagctggtgacccgcatctaccgcggggtcgagccgcagcttccgaactggttcgcggtgaccaagacgcgtaatggcgccggaggcgggaacaaggtggtggacgactgctacatccccaactacctgctccccaagacccagcccgagctccagtgggcgtggactaacatggaccagtatataagcgcctgtttgaatctcgcggagcgtaaacggctggtggcgcagcatctgacgcacgtgtcgcagacgcaggagcagaacaaggaaaaccagaaccccaattctgacgcgccggtcatcaggtcaaaaacctccgccaggtacatggagctggtcgggtggctggtggaccgcgggatcacgtcagaaaagcaatggatccaggaggaccaggcgtcctacatctccttcaacgccgcctccaactcgcggtcacaaatcaaggccgcgctggacaatgcctccaaaatcatgagcctgacaaagacggctccggactacctggtgggccagaacccgccggaggacatttccagcaaccgcatctaccgaatcctcgagatgaacgggtacgatccgcagtacgcggcctccgtcttcctgggctgggcgcaaaagaagttcgggaagaggaacaccatctggctctttgggccggccacgacgggtaaaaccaacatcgcggaagccatcgcccacgccgtgcccttctacggctgcgtgaactggaccaatgagaactttccgttcaacgattgcgtcgacaagatggtgatctggtgggaggagggcaagatgacggccaaggtcgtagagagcgccaaggccatcctgggcggaagcaaggtgcgcgtggaccaaaagtgcaagtcatcggcccagatcgacccaactcccgtgatcgtcacctccaacaccaacatgtgcgcggtcatcgacggaaactcgaccaccttcgagcaccaacaaccactccaggaccggatgttcaagttcgagctcaccaagcgcctggagcacgactttggcaaggtcaccaagcaggaagtcaaagactttttccggtgggcgtcagatcacgtgaccgaggtgactcacgagttttacgtcagaaagggtggagctagaaagaggcccgcccccaatgacgcagatataagtgagcccaagcgggcctgtccgtcagttgcgcagccatcgacgtcagacgcggaagctccggtggactacgcggacagattggctagaggacaacctctctga

SEQ ID NO: 414 - DNA, 1872 bp, unidentified; identical to SEQ ID NO: 412
  source 1..1872: mol_type = unassigned DNA; note = Adeno-associated virus 4

SEQ ID NO: 415 - DNA, 1617 bp, unidentified
  source 1..1617: mol_type = unassigned DNA; note = Adeno-associated virus 4
  misc_difference 162: note = modified_base - a, c, t, or g
atgcgtgcagcagctggcggagctgcagtcgagggsggacaaggtgccgatggagtgggtaatgcctcgggtgattggcattgcgattccacctggtctgagggccacgtcacgaccaccagcaccagaacctgggtcttgcccacctacaacaaccacctntacaagcgactcggagagagcctgcagtccaacacctacaacggattctccaccccctggggatactttgacttcaaccgcttccactgccacttctcaccacgtgactggcagcgactcatcaacaacaactggggcatgcgacccaaagccatgcgggtcaaaatcttcaacatccaggtcaaggaggtcacgacgtcgaacggcgagacaacggtggctaataaccttaccagcacggttcagatctttgcggactcgtcgtacgaactgccgtacgtgatggatgcgggtcaagagggcagcctgcctccttttcccaacgacgtctttatggtgccccagtacggctactgtggactggtgaccggcaacacttcgcagcaacagactgacagaaatgccttctactgcctggagtactttccttcgcagatgctgcggactggcaacaactttgaaattacgtacagttttgagaaggtgcctttccactcgatgtacgcgcacagccagagcctggaccggctgatgaaccctctcatcgaccagtacctgtggggactgcaatcgaccaccaccggaaccaccctgaatgccgggactgccaccaccaactttaccaagctgcggcctaccaacttttccaactttaaaaagaactggctgcccgggccttcaatcaagcagcagggcttctcaaagactgccaatcaaaactacaagatccctgccaccgggtcagacagtctcatcaaatacgagacgcacagcactctggacggaagatggagtgccctgacccccggacctccaatggccacggctggacctgcggacagcaagttcagcaacagccagctcatctttgcggggcctaaacagaacggcaacacggccaccgtacccgggactctgatcttcacctctgaggaggagctggcagccaccaacgccaccgatacggacatgtggggcaacctacctggcggtgaccagagcaacagcaacctgccgaccgtggacagactgacagccttgggagccgtgcctggaatggtctggcaaaacagagacatttactaccagggtcccatttgggccaagattcctcataccgatggacactttcacccctcaccgctgattggtgggtttgggctgaaacacccgcctcctcaaatttttatcaagaacaccccggtacctgcgaatcctgcaacgaccttcagctctactccggtaaactccttcattactcagtacagcactggccaggtgtcggtgcagattgactgggagatccagaaggagcggtccaaacgctggaaccccgaggtccagtttacctccaactacggacagcaaaactctctgttgtgggctcccgatgcggctgggaaatacactgagcctagggctatcggtacccgctacctcacccaccacctgtaa

SEQ ID NO: 416 - DNA, 939 bp, unidentified
  source 1..939: mol_type = unassigned DNA; note = Adeno-associated virus 4
atggagctggtcgggtggctggtggaccgcgggatcacgtcagaaaagcaatggatccaggaggaccaggcgtcctacatctccttcaacgccgcctccaactcgcggtcacaaatcaaggccgcgctggacaatgcctccaaaatcatgagcctgacaaagacggctccggactacctggtgggccagaacccgccggaggacatttccagcaaccgcatctaccgaatcctcgagatgaacgggtacgatccgcagtacgcggcctccgtcttcctgggctgggcgcaaaagaagttcgggaagaggaacaccatctggctctttgggccggccacgacgggtaaaaccaacatcgcggaagccatcgcccacgccgtgcccttctacggctgcgtgaactggaccaatgagaactttccgttcaacgattgcgtcgacaagatggtgatctggtgggaggagggcaagatgacggccaaggtcgtagagagcgccaaggccatcctgggcggaagcaaggtgcgcgtggaccaaaagtgcaagtcatcggcccagatcgacccaactcccgtgatcgtcacctccaacaccaacatgtgcgcggtcatcgacggaaactcgaccaccttcgagcaccaacaaccactccaggaccggatgttcaagttcgagctcaccaagcgcctggagcacgactttggcaaggtcaccaagcaggaagtcaaagactttttccggtgggcgtcagatcacgtgaccgaggtgactcacgagttttacgtcagaaagggtggagctagaaagaggcccgcccccaatgacgcagatataagtgagcccaagcgggcctgtccgtcagttgcgcagccatcgacgtcagacgcggaagctccggtggactacgcggacagattggctagaggacaacctctctga

SEQ ID NO: 417 - DNA, 1197 bp, unidentified
  source 1..1197: mol_type = unassigned DNA; note = Adeno-associated virus 4
atggagctggtcgggtggctggtggaccgcgggatcacgtcagaaaagcaatggatccaggaggaccaggcgtcctacatctccttcaacgccgcctccaactcgcggtcacaaatcaaggccgcgctggacaatgcctccaaaatcatgagcctgacaaagacggctccggactacctggtgggccagaacccgccggaggacatttccagcaaccgcatctaccgaatcctcgagatgaacgggtacgatccgcagtacgcggcctccgtcttcctgggctgggcgcaaaagaagttcgggaagaggaacaccatctggctctttgggccggccacgacgggtaaaaccaacatcgcggaagccatcgcccacgccgtgcccttctacggctgcgtgaactggaccaatgagaactttccgttcaacgattgcgtcgacaagatggtgatctggtgggaggagggcaagatgacggccaaggtcgtagagagcgccaaggccatcctgggcggaagcaaggtgcgcgtggaccaaaagtgcaagtcatcggcccagatcgacccaactcccgtgatcgtcacctccaacaccaacatgtgcgcggtcatcgacggaaactcgaccaccttcgagcaccaacaaccactccaggaccggatgttcaagttcgagctcaccaagcgcctggagcacgactttggcaaggtcaccaagcaggaagtcaaagactttttccggtgggcgtcagatcacgtgaccgaggtgactcacgagttttacgtcagaaagggtggagctagaaagaggcccgcccccaatgacgcagatataagtgagcccaagcgggcctgtccgtcagttgcgcagccatcgacgtcagacgcggaagctccggtggactacgcggacaggtaccaaaacaaatgttctcgtcacgtgggtatgaatctgatgctttttccctgccggcaatgcgagagaatgaatcagaatgtggacatttgcttcacgcacggggtcatggactgtgccgagtgcttccccgtgtcagaatctcaacccgtgtctgtcgtcagaaagcggacgtatcagaaactgtgtccgattcatcacatcatggggagggcgcccgaggtggcctgctcggcctgcgaactggccaatgtggacttggatgactgtgacatggaacaa

SEQ ID NO: 418 - DNA, 245 bp, unidentified
  source 1..245: mol_type = unassigned DNA; note = Adeno-associated virus 4
ctccatcatctaggtttgcccactgacgtcaatgtgacgtcctagggttagggaggtccctgtattagcagtcacgtgagtgtcgtatttcgcggagcgtagcggagcgcataccaagctgccacgtcacagccacgtggtccgtttgcgacagtttgcgacaccatgtggtcaggagggtatataaccgcgagtgagccagcgaggagctccattttgcccgcgaattttgaacgagcagcagc

SEQ ID NO: 419 - protein, 313 aa, unidentified
  source 1..313: note = Adeno-associated virus 4
  VARIANT 313: note = MOD_RES - Any amino acid
MELVGWLVDRGITSEKQWIQEDQASYISFNAASNSRSQIKAALDNASKIMSLTKTAPDYLVGQNPPEDISSNRIYRILEMNGYDPQYAASVFLGWAQKKFGKRNTIWLFGPATTGKTNIAEAIAHAVPFYGCVNWTNENFPFNDCVDKMVIWWEEGKMTAKVVESAKAILGGSKVRVDQKCKSSAQIDPTPVIVTSNTNMCAVIDGNSTTFEHQQPLQDRMFKFELTKRLEHDFGKVTKQEVKDFFRWASDHVTEVTHEFYVRKGGARKRPAPNDADISEPKRACPSVAQPSTSDAEAPVDYADRLARGQPLX

SEQ ID NO: 420 - protein, 399 aa, unidentified
  source 1..399: note = Adeno-associated virus 4
MELVGWLVDRGITSEKQWIQEDQASYISFNAASNSRSQIKAALDNASKIMSLTKTAPDYLVGQNPPEDISSNRIYRILEMNGYDPQYAASVFLGWAQKKFGKRNTIWLFGPATTGKTNIAEAIAHAVPFYGCVNWTNENFPFNDCVDKMVIWWEEGKMTAKVVESAKAILGGSKVRVDQKCKSSAQIDPTPVIVTSNTNMCAVIDGNSTTFEHQQPLQDRMFKFELTKRLEHDFGKVTKQEVKDFFRWASDHVTEVTHEFYVRKGGARKRPAPNDADISEPKRACPSVAQPSTSDAEAPVDYADRYQNKCSRHVGMNLMLFPCRQCERMNQNVDICFTHGVMDCAECFPVSESQPVSVVRKRTYQKLCPIHHIMGRAPEVACSACELANVDLDDCDMEQ

SEQ ID NO: 421 - protein, 623 aa, unidentified
  source 1..623: note = Adeno-associated virus 4
MPGFYEIVLKVPSDLDEHLPGISDSFVSWVAEKEWELPPDSDMDLNLIEQAPLTVAEKLQREFLVEWRRVSKAPEALFFVQFEKGDSYFHLHILVETVGVKSMVVGRYVSQIKEKLVTRIYRGVEPQLPNWFAVTKTRNGAGGGNKVVDDCYIPNYLLPKTQPELQWAWTNMDQYISACLNLAERKRLVAQHLTHVSQTQEQNKENQNPNSDAPVIRSKTSARYMELVGWLVDRGITSEKQWIQEDQASYISFNAASNSRSQIKAALDNASKIMSLTKTAPDYLVGQNPPEDISSNRIYRILEMNGYDPQYAASVFLGWAQKKFGKRNTIWLFGPATTGKTNIAEAIAHAVPFYGCVNWTNENFPFNDCVDKMVIWWEEGKMTAKVVESAKAILGGSKVRVDQKCKSSAQIDPTPVIVTSNTNMCAVIDGNSTTFEHQQPLQDRMFKFELTKRLEHDFGKVTKQEVKDFFRWASDHVTEVTHEFYVRKGGARKRPAPNDADISEPKRACPSVAQPSTSDAEAPVDYADRYQNKCSRHVGMNLMLFPCRQCERMNQNVDICFTHGVMDCAECFPVSESQPVSVVRKRTYQKLCPIHHIMGRAPEVACSACELANVDLDDCDMEQ

SEQ ID NO: 422 - protein, 537 aa, unidentified
  source 1..537: note = Adeno-associated virus 4
  VARIANT 537: note = MOD_RES - Any amino acid
MPGFYEIVLKVPSDLDEHLPGISDSFVSWVAEKEWELPPDSDMDLNLIEQAPLTVAEKLQREFLVEWRRVSKAPEALFFVQFEKGDSYFHLHILVETVGVKSMVVGRYVSQIKEKLVTRIYRGVEPQLPNWFAVTKTRNGAGGGNKVVDDCYIPNYLLPKTQPELQWAWTNMDQYISACLNLAERKRLVAQHLTHVSQTQEQNKENQNPNSDAPVIRSKTSARYMELVGWLVDRGITSEKQWIQEDQASYISFNAASNSRSQIKAALDNASKIMSLTKTAPDYLVGQNPPEDISSNRIYRILEMNGYDPQYAASVFLGWAQKKFGKRNTIWLFGPATTGKTNIAEAIAHAVPFYGCVNWTNENFPFNDCVDKMVIWWEEGKMTAKVVESAKAILGGSKVRVDQKCKSSAQIDPTPVIVTSNTNMCAVIDGNSTTFEHQQPLQDRMFKFELTKRLEHDFGKVTKQEVKDFFRWASDHVTEVTHEFYVRKGGARKRPAPNDADISEPKRACPSVAQPSTSDAEAPVDYADRLARGQPLX

SEQ ID NO: 423 - protein, 623 aa, unidentified; identical to SEQ ID NO: 421
  source 1..623: note = Adeno-associated virus 4

SEQ ID NO: 424 - protein, 544 aa, unidentified
  source 1..544: note = Adeno-associated virus 4
MSDDSEMRAAAGGAAVEGGQGADGVGNASGDWHCDSTWSEGHVTTTSTRTWVLPTYNNHLYKRLGESLQSNTYNGFSTPWGYFDFNRFHCHFSPRDWQRLINNNWGMRPKAMRVKIFNIQVKEVTTSNGETTVANNLTSTVQIFADSSYELPYVMDAGQEGSLPPFPNDVFMVPQYGYCGLVTGNTSQQQTDRNAFYCLEYFPSQMLRTGNNFEITYSFEKVPFHSMYAHSQSLDRLMNPLIDQYLWGLQSTTTGTTLNAGTATTNFTKLRPTNFSNFKKNWLPGPSIKQQGFSKTANQNYKIPATGSDSLIKYETHSTLDGRWSALTPGPPMATAGPADSKFSNSQLIFAGPKQNGNTATVPGTLIFTSEEELAATNATDTDMWGNLPGGDQSNSNLPTVDRLTALGAVPGMVWQNRDIYYQGPIWAKIPHTDGHFHPSPLIGGFGLKHPPPQIFIKNTPVPANPATTFSSTPVNSFITQYSTGQVSVQIDWEIQKERSKRWNPEVQFTSNYGQQNSLLWAPDAAGKYTEPRAIGTRYLTHHL

SEQ ID NO: 425 - protein, 734 aa, unidentified
  source 1..734: note = Adeno-associated virus 4
MTDGYLPDWLEDNLSEGVREWWALQPGAPKPKANQQHQDNARGLVLPGYKYLGPGNGLDKGEPVNAADAAALEHDKAYDQQLKAGDNPYLKYNHADAEFQQRLQGDTSFGGNLGRAVFQAKKRVLEPLGLVEQAGETAPGKKRPLIESPQQPDSSTGIGKKGKQPAKKKLVFEDETGAGDGPPEGSTSGAMSDDSEMRAAAGGAAVEGGQGADGVGNASGDWHCDSTWSEGHVTTTSTRTWVLPTYNNHLYKRLGESLQSNTYNGFSTPWGYFDFNRFHCHFSPRDWQRLINNNWGMRPKAMRVKIFNIQVKEVTTSNGETTVANNLTSTVQIFADSSYELPYVMDAGQEGSLPPFPNDVFMVPQYGYCGLVTGNTSQQQTDRNAFYCLEYFPSQMLRTGNNFEITYSFEKVPFHSMYAHSQSLDRLMNPLIDQYLWGLQSTTTGTTLNAGTATTNFTKLRPTNFSNFKKNWLPGPSIKQQGFSKTANQNYKIPATGSDSLIKYETHSTLDGRWSALTPGPPMATAGPADSKFSNSQLIFAGPKQNGNTATVPGTLIFTSEEELAATNATDTDMWGNLPGGDQSNSNLPTVDRLTALGAVPGMVWQNRDIYYQGPIWAKIPHTDGHFHPSPLIGGFGLKHPPPQIFIKNTPVPANPATTFSSTPVNSFITQYSTGQVSVQIDWEIQKERSKRWNPEVQFTSNYGQQNSLLWAPDAAGKYTEPRAIGTRYLTHHL

SEQ ID NO: 426 - protein, 598 aa, unidentified
  source 1..598: note = Adeno-associated virus 4
TAPGKKRPLIESPQQPDSSTGIGKKGKQPAKKKLVFEDETGAGDGPPEGSTSGAMSDDSEMRAAAGGAAVEGGQGADGVGNASGDWHCDSTWSEGHVTTTSTRTWVLPTYNNHLYKRLGESLQSNTYNGFSTPWGYFDFNRFHCHFSPRDWQRLINNNWGMRPKAMRVKIFNIQVKEVTTSNGETTVANNLTSTVQIFADSSYELPYVMDAGQEGSLPPFPNDVFMVPQYGYCGLVTGNTSQQQTDRNAFYCLEYFPSQMLRTGNNFEITYSFEKVPFHSMYAHSQSLDRLMNPLIDQYLWGLQSTTTGTTLNAGTATTNFTKLRPTNFSNFKKNWLPGPSIKQQGFSKTANQNYKIPATGSDSLIKYETHSTLDGRWSALTPGPPMATAGPADSKFSNSQLIFAGPKQNGNTATVPGTLIFTSEEELAATNATDTDMWGNLPGGDQSNSNLPTVDRLTALGAVPGMVWQNRDIYYQGPIWAKIPHTDGHFHPSPLIGGFGLKHPPPQIFIKNTPVPANPATTFSSTPVNSFITQYSTGQVSVQIDWEIQKERSKRWNPEVQFTSNYGQQNSLLWAPDAAGKYTEPRAIGTRYLTHHL

SEQ ID NO: 427 - DNA, 129 bp, unidentified
  source 1..129: mol_type = unassigned DNA; note = Adeno-associated virus 4
ttggccactccctctatgcgcgctcgctcactcactcggccctgcggccagaggccggcagtctggagacctttggtgtccagggcagggccgagtgagtgagcgagcgcgcatagagggagtggccaa

SEQ ID NO: 428 - DNA, 125 bp, unidentified
  source 1..125: mol_type = unassigned DNA; note = Adeno-associated virus 4
ttggccactccctctatgcgcgctcgctcactcactcggccctggagaccaaaggtctccagactgccggcctctggccggcagggccgagtgagtgagcgagcgcgcatagagggagtggccaa

SEQ ID NO: 429 - DNA, 4768 bp, unidentified
  source 1..4768: mol_type = unassigned DNA; note = Adeno-associated virus 4
  misc_difference 3009: note = modified_base - a, c, t, or g
ttggccactccctctatgcgcgctcgctcactcactcggccctggagaccaaaggtctccagactgccggcctctggccggcagggccgagtgagtgagcgagcgcgcatagagggagtggccaactccatcatctaggtttgcccactgacgtcaatgtgacgtcctagggttagggaggtccctgtattagcagtcacgtgagtgtcgtatttcgcggagcgtagcggagcgcataccaagctgccacgtcacagccacgtggtccgtttgcgacagtttgcgacaccatgtggtcaggagggtatataaccgcgagtgagccagcgaggagctccattttgcccgcgaattttgaacgagcagcagccatgccggggttctacgagatcgtgctgaaggtgcccagcgacctggacgagcacctgcccggcatttctgactcttttgtgagctgggtggccgagaaggaatgggagctgccgccggattctgacatggacttgaatctgattgagcaggcacccctgaccgtggccgaaaagctgcaacgcgagttcctggtcgagtggcgccgcgtgagtaaggccccggaggccctcttctttgtccagttcgagaagggggacagctacttccacctgcacatcctggtggagaccgtgggcgtcaaatccatggtggtgggccgctacgtgagccagattaaagagaagctggtgacccgcatctaccgcggggtcgagccgcagcttccgaactggttcgcggtgaccaagacgcgtaatggcgccggaggcgggaacaaggtggtggacgactgctacatccccaactacctgctccccaagacccagcccgagctccagtgggcgtggactaacatggaccagtatataagcgcctgtttgaatctcgcggagcgtaaacggctggtggcgcagcatctgacgcacgtgtcgcagacgcaggagcagaacaaggaaaaccagaaccccaattctgacgcgccggtcatcaggtcaaaaacctccgccaggtacatggagctggtcgggtggctggtggaccgcgggatcacgtcagaaaagcaatggatccaggaggaccaggcgtcctacatctccttcaacgccgcctccaactcgcggtcacaaatcaaggccgcgctggacaatgcctccaaaatcatgagcctgacaaagacggctccggactacctggtgggccagaacccgccggaggacatttccagcaaccgcatctaccgaatcctcgagatgaacgggtacgatccgcagtacgcggcctccgtcttcctgggctgggcgcaaaagaagttcgggaagaggaacaccatctggctctttgggccggccacgacgggtaaaaccaacatcgcggaagccatcgcccacgccgtgcccttctacggctgcgtgaactggaccaatgagaactttccgttcaacgattgcgtcgacaagatggtgatctggtgggaggagggcaagatgacggccaaggtcgtagagagcgccaaggccatcctgggcggaagcaaggtgcgcgtggaccaaaagtgcaagtcatcggcccagatcgacccaactcccgtgatcgtcacctccaacaccaacatgtgcgcggtcatcgacggaaactcgaccaccttcgagcaccaacaaccactccaggaccggatgttcaagttcgagctcaccaagcgcctggagcacgactttggcaaggtcaccaagcaggaagtcaaagactttttccggtgggcgtcagatcacgtgaccgaggtgactcacgagttttacgtcagaaagggtggagctagaaagaggcccgcccccaatgacgcagatataagtgagcccaagcgggcctgtccgtcagttgcgcagccatcgacgtcagacgcggaagctccggtggactacgcggacaggtaccaaaacaaatgttctcgtcacgtgggtatgaatctgatgctttttccctgccggcaatgcgagagaatgaatcagaatgtggacatttgcttcacgcacggggtcatggactgtgccgagtgcttccccgtgtcagaatctcaacccgtgtctgtcgtcagaaagcggacgtatcagaaactgtgtccgattcatcacatcatggggagggcgcccgaggtggcctgctcggcctgcgaactggccaatgtggacttggatgactgtgacatggaacaataaatgactcaaaccagatatgactgacggttaccttccagattggctagaggacaacctctctgaaggcgttcgagagtggtgggcgctgcaacctggagcccctaaacccaaggcaaatcaacaacatcaggacaacgctcggggtcttgtgcttccgggttacaaatacctcggacccggcaacggactcgacaagggggaacccgtcaacgcagcggacgcggcagccctcgagcacgacaaggcctacgaccagcagctcaaggccggtgacaacccctacctcaagtacaaccacgccgacgcggagttccagcagcggcttcagggcgacacaccgtttgggggcaacctcggcagagcagtcttccaggccaaaaagagggttcttgaacctcttggtctggttgagcaagcgggtgagacggctcctggaaagaagagaccgttgattgaatccccccagcagcccgactcctccacgggtatcggcaaaaaaggcaagcagccggctaaaaagaagctcgttttcgaagacgaaactggagcaggcgacggaccccctgagggatcaacttccggagccatgtctgatgacagtgagatgcgtgcagcagctggcggagctgcagtcgagggsggacaaggtgccgatggagtgggtaatgcctcgggtgattggcattgcgattccacctggtctgagggccacgtcacgaccaccagcaccagaacctgggtcttgcccacctacaacaaccacctntacaagcgactcggagagagcctgcagtccaacacctacaacggattctccaccccctggggatactttgacttcaaccgcttccactgccacttctcaccacgtgactggcagcgactcatcaacaacaactggggcatgcgacccaaagccatgcgggtcaaaatcttcaacatccaggtcaaggaggtcacgacgtcgaacggcgagacaacggtggctaataaccttaccagcacggttcagatctttgcggactcgtcgtacgaactgccgtacgtgatggatgcgggtcaagagggcagcctgcctccttttcccaacgacgtctttatggtgccccagtacggctactgtggactggtgaccggcaacacttcgcagcaacagactgacagaaatgccttctactgcctggagtactttccttcgcagatgctgcggactggcaacaactttgaaattacgtacagttttgagaaggtgcctttccactcgatgtacgcgcacagccagagcctggaccggctgatgaaccctctcatcgaccagtacctgtggggactgcaatcgaccaccaccggaaccaccctgaatgccgggactgccaccaccaactttaccaagctgcggcctaccaacttttccaactttaaaaagaactggctgcccgggccttcaatcaagcagcagggcttctcaaagactgccaatcaaaactacaagatccctgccaccgggtcagacagtctcatcaaatacgagacgcacagcactctggacggaagatggagtgccctgacccccggacctccaatggccacggctggacctgcggacagcaagttcagcaacagccagctcatctttgcggggcctaaacagaacggcaacacggccaccgtacccgggactctgatcttcacctctgaggaggagctggcagccaccaacgccaccgatacggacatgtggggcaacctacctggcggtgaccagagcaacagcaacctgccgaccgtggacagactgacagccttgggagccgtgcctggaatggtctggcaaaacagagacatttactaccagggtcccatttgggccaagattcctcataccgatggacactttcacccctcaccgctgattggtgggtttgggctgaaacacccgcctcctcaaatttttatcaagaacaccccggtacctgcgaatcctgcaacgaccttcagctctactccggtaaactccttcattactcagtacagcactggccaggtgtcggtgcagattgactgggagatccagaaggagcggtccaaacgctggaaccccgaggtccagtttacctccaactacggacagcaaaactctctgttgtgggctcccgatgcggctgggaaatacactgagcctagggctatcggtacccgctacctcacccaccacctgtaataacctgttaatcaataaaccggtttattcgtttcagttgaactttggtctccgtgtccttcttatcttatctcgtttccatggctactgcgtacataagcagcggcctgcggcgcttgcgcttcgcggtttacaactgccggttaatcagtaacttctggcaaaccatgatgatggagttggccactccctctatgcgcgctcgctcactcactcggccctggagaccaaaggtctccagactgccggcctctggccggcagggccgagtgagtgagcgagcgcgcatagagggagtggccaa

SEQ ID NO: 430 - protein, 3098 aa, unidentified
  source 1..3098: note = Adeno-associated virus
GAATTCGCCCTTTCTACGGCTGCGTCAACTGGACCAATGAGAACTTTCCCTTCAACGATTGCGTCGACAAGATGGTGATCTGGTGGGAGGAGGGCAAGATGACGGCCAAGGTCGTGGAGTCCGCCAAGGCCATTCTCGGCGGCAGCAAGGTGCGCGTGGACCAAAAGTGCAAGTCTTCCGCCCAGATCGATCCCACCCCCGTGATCGTCACTTCCAACACCAACATGTGCGCTGTGATTGACGGGAACAGCACCACCTTCGAGCACCAGCAGCCGTTACAAGACCGGATGTTCAAATTTGAACTCACCCGCCGTCTGGAGCACGACTTTGGCAAGGTGACAAAGCAGGAAGTCAAAGAGTTCTTCCGCTGGGCGCAGGATCACGTGACCGAGGTGGCGCATGAGTTCTACGTCAGAAAGGGTGGAGCCAACAAGAGACCCGCCCCCGATGACGCGGATAAAAGCGAGCCCAAGCGGGCCTGCCCCTCAGTCGCGGATCCATCGACGTCAGACGCGGAAGGAGCTCCGGTGGACTTTGCCGACAGGTACCAAAACAAATGTTCTCGTCACGCGGGCATGCTTCAGATGCTGTTTCCCTGCAAGACATGCGAGAGAATGAATCAGAATTTCAACATTTGCTTCACGCACGGGACCAGAGACTGTTCAGAATGTTTCCCCGGCGTGTCAGAATCTCAACCGGTCGTCAGAAAGAGGACGTATCGGAAACTCTGTGCCATTCATCATCTGCTGGGGCGGGCTCCCGAGATTGCTTGCTCGGCCTGCGATCTGGTCAACGTGGACCTGGATGACCGTGTTTCTGAGCAATAAATGACTTAAACCAGGTATGGCTGCCGATGGTTATCTTCCAGATTGGCTCGAGGACAACCTCTCTGAGGGCATTCGCGAGTGGTGGGACTTGAAACCTGGAGCCCCGAAACCCAAAGCCAACCAGCAAAAGCAGGACGACGGCCGGGGTCTGGTGCTTCCTGGCTACAAGTACCTCGGACCCTTCAACGGACTCGACAAGGGAGAGCCGGTCAACGAGGCAGACGCCGCGGCCCTCGAGCACGACAAGGCCTACGACAAGCAGCTCGAGCAGGGGGACAACCCGTACCTCAAGTACAACCACGCCGACGCCGAGTTTCAGGAGCGTCTTCAAGAAGATACGTCTTTTGGGGGCAACCTCGGGCGAGCAGTCTTCCAGGCCAAGAAGCGGGTTCTCGAACCTCTCGGTCTGGTTGAGGAAGGCGCTAAGACGGCTCCTGGAAAGAAGAGACCCATAGAATCCCCCGACTCCTCCACGGGCATCGGCAAGAAAGGCCAGCAGCCCGCTAAAAAGAAGCTCAACTTTGGGCAGACTGGCGACTCAGAGTCAGTGCCCGACCCCCAACCTCTCGGAGAACCTCCCGCCGCGCCCTCAGGTCTGGGATCTGGTACAATGGCTGCAGGCGGTGGCGCACCAATGGCAGACAATAACGAAGGCGCCGACGGAGTGGGTAATGCCTCCGGAAATTGGCATTGCGATTCCACATGGCTGGGCGACAGAGTCATCACCACCAGCACCCGCACCTGGGCCCTGCCCACCTACAACAACCACCTCTACAAGCAGATATCAAGTCAGAGCGGGGCTACCAACGACAACCACTTCTTCGGCTACAGCACCCCCTGGGGCTATTTTGACTTCAACAGATTCCACTGCCACTTCTCACCACGTGACTGGCAGCGACTCATCAACAACAACTGGGGATTCCGGCCCAGAAAGCTGCGGTTCAAGTTGTTCAACATCCAGGTCAAGGAGGTCACGACGAACGACGGCGTTACGACCATCGCTAATAACCTTACCAGCACGATTCAGGTCTTCTCGGACTCGGAGTACCAACTGCCGTACGTCCTCGGCTCTGCGCACCAGGGCTGCCTCCCTCCGTTCCCTGCGGACGTGTTCATGATTCCTCAGTACGGATATCTGACTCTAAACAACGGCAGTCAGTCTGTGGGACGTTCCTCCTTCTACTGCCTGGAGTACTTTCCTTCTCAGATGCTGAGAACGGGCAATAACTTTGAATTCAGCTACACCTTTGAGGAAGTGCCTTTCCACAGCAGCTATGCGCACAGCCAGAGCCTGGACCGGCTGATGAATCCCCTCATCGACCAGTACCTGTACTACCTGGCCCGGACCCAGAGCACTACGGGGTCCACAAGGGAGCTGCAGTTCCATCAGGCTGGGCCCAACACCATGGCCGAGCAATCAAAGAACTGGCTGCCCGGACCCTGTTATCGGCAGCAGAGACTGTCAAAAAACATAGACAGCAACAACAACAGTAACTTTGCCTGGACCGGGGCCACTAAATACCATCTGAATGGTAGAAATTCATTAACCAACCCGGGCGTAGCCATGGCCACCAACAAGGACGACGAGGACCAGTTCTTTCCCATCAACGGAGTGCTGGTTTTTGGCGAAACGGGGGCTGCCAACAAGACAACGCTGGAAAACGTGCTAATGACCAGCGAGGAGGAGATCAAAACCACCAATCCCGTGGCTACAGAAGAATACGGTGTGGTCTCCAGCAACCTGCAATCGTCTACGGCCGGACCCCAGACACAGACTGTCAACAGCCAGGGGGCTCTGCCCGGCATGGTCTGGCAGAACCGGGACGTGTACCTGCAGGGTCCCATCTGGGCCAAAATTCCTCACACGGACGGCAACTTTCACCCGTCTCCCCTGATGGGCGGATTTGGACTCAAACACCCGCCTCCTCAAATTCTCATCAAAAACACCCCGGTACCTGCTAATCCTCCAGAGGTGTTTACTCCTGCCAAGTTTGCCTCATTTATCACGCAGTACAGCACCGGCCAGGTCAGCGTGGAGATCGAGTGGGAACTGCAGAAAGAAAACAGCAAACGCTGGAATCCAGAGATTCAGTACACCTCAAATTATGCCAAGTCTAATAATGTGGAATTTGCTGTCAACAACGAAGGGGTTTATACTGAGCCTCGCCCCATTGGCACCCGTTACCTCACCCGTAACCTGTAATTGCCTGTTAATCAATAAACCGGTTAATTCGTTTCAGTTGAACTTTGGTCTCTGCGAAGGGCGAATTC

SEQ ID NO: 431 - protein, 728 aa, unidentified
  source 1..728: note = Adeno-associated virus
MAADGYLPDWLEDNLSEGIREWWDLKPGAPKPKANQQKQDDGRGLVLPGYKYLGPFNGLDKGEPVNEADAAALEHDKAYDKQLEQGDNPYLKYNHADAEFQERLQEDTSFGGNLGRAVFQAKKRVLEPLGLVEEGAKTAPGKKRPIESPDSSTGIGKKGQQPAKKKLNFGQTGDSESVPDPQPLGEPPAAPSGLGSGTMAAGGGAPMADNNEGADGVGNASGNWHCDSTWLGDRVITTSTRTWALPTYNNHLYKQISSQSGATNDNHFFGYSTPWGYFDFNRFHCHFSPRDWQRLINNNWGFRPRKLRFKLFNIQVKEVTTNDGVTTIANNLTSTIQVFSDSEYQLPYVLGSAHQGCLPPFPADVFMIPQYGYLTLNNGSQSVGRSSFYCLEYFPSQMLRTGNNFEFSYTFEEVPFHSSYAHSQSLDRLMNPLIDQYLYYLARTQSTTGSTRELQFHQAGPNTMAEQSKNWLPGPCYRQQRLSKNIDSNNNSNFAWTGATKYHLNGRNSLTNPGVAMATNKDDEDQFFPINGVLVFGETGAANKTTLENVLMTSEEEIKTTNPVATEEYGVVSSNLQSSTAGPQTQTVNSQGALPGMVWQNRDVYLQGPIWAKIPHTDGNFHPSPLMGGFGLKHPPPQILIKNTPVPANPPEVFTPAKFASFITQYSTGQVSVEIEWELQKENSKRWNPEIQYTSNYAKSNNVEFAVNNEGVYTEPRPIGTRYLTRNL

SEQ ID NO: 432 - DNA, 2495 bp, unidentified
  source 1..2495: mol_type = unassigned DNA; note = Adeno-associated virus
gaattcgccctttctacggctgcgtcaactagaccaatgagaactttcccttcaacgattgcgtcgacaagatggtgatctggtgggaggagggcaagatgacggccaaggtcgtggagtccgccaaggccattcatcatctgctggggcgggctcccgagattgcttgctcggcctgcgatctggtcaacgtggacctggatgactgtgtttctgagcaataaatgacttaaaccaggtatggctgccgatggttatcttccagattggctcgaggacaacctctctgagggcattcgcgagtggtgggacttgaaacctggagccccgaaacccaaagccaaccagcaaaagcaggacgacggccggggtctggtgcttcctggctacaagtacctcggacccttcaacggactcgacaagggagagccggtcaacgaggcagacgccgcggccctcgagcacgacaaggcctacgacaagcagctcgagcagggggacaacccgtacctcaagtacaaccacgccgacgccgagtttcaggagcgtcttcaagaagatacgtcttttgggggcaacctcgggcgagcagtcttccaggccaagaagcgggttctcgaacctctcggtctggttgaggaaggcgctaagacggctcctggaaagaagagacccatagaatcccccgactcctccacgggcatcggcaagaaaggccagcagcccgctaaaaagaagctcaactttgggcagactggcgactcagagtcagtgcccgaccctcaaccaatcggagaaccccccgcaggcccctctggtctgggatctggtacaatggctgcaggcggtggcgctccaatggcagacaataacgaaggcgccgacggagtgggtaatgcctccggaaattggcattgcgattccacatggctgggcgacagagtcatcaccaccagcacccgcacctgggccctgcccacctacaacaaccacctctacaagcagatatcaagtcagagcggggctaccaacgacaaccacttcttcggctacagcaccccctggggctattttgacttcaacagattccactgccacttctcaccacgtgactggcagcgactcatcaacaacaactggggattccggcccagaaagctgcggttcaagttgttcaacatccaggtcaaggaggtcacgacgaacgacggcgttacgaccatcgctaataaccttaccagcacgattcaggtcttctcggactcggagtaccaactgccgtacgtcctcggctctgcgcaccagggctgcctccctccgttccctgcggacgtgttcatgattcctcagtacggatatctgactctaaacaacggcagtcagtctgtgggacgttcctccttctactgcctggagtactttccttctcagatgctgagaacgggcaataactttgaattcagctacacctttgaggaagtgcctttccacagcagctatgcgcacagccagagcctggaccggctgatgaatcccctcatcgaccagtacctgtactacctggcccggacccagagcactacggggtccacaagggagctgcagttccatcaggctgggcccaacaccatggccgagcaatcaaagaactggctgcccggaccctgttatcggcagcagagactgtcaaaaaacatagacagcaacaacaccagtaactttgcctggaccggggccactaaataccatctgaatggtagaaattcattaaccaacccgggcgtagccatggccaccaacaaggacgacgaggaccagttctttcccatcaacggagtgctggtttttggcaaaacgggggctgccaacaagacaacgctggaaaacgtgctaatgaccagcgaggaggagatcaaaaccaccaatcccgtggctacagaacagtacggtgtggtctccagcaacctgcaatcgtctacggccggaccccagacacagactgtcaacagccagggggctctgcccggcatggtctggcagaaccgggacgtgtacctgcagggtcccatctgggccaaaattcctcacacggacggcaactttcacccgtctcccctgatgggcggatttggactcaaacacccgcctcctcaaattctcatcaaaaacaccccggtacctgctaatcctccagaggtgtttactcctgccaagtttgcctcatttatcacgcagtacagcaccggccaggtcagcgtggagatcgagtgggaactgcagaaagaaaacagcaaacgctggaatccagagattcagtacacctcaaattatgccaagtctaataatgtggaatttgctgtcaacaacgaaggggtttatactgagcctcgccccattggcacccgttacctcacccgtaacctgtaattgcctgttaatcaataaaccggttaattcgtttcagttgaactttggtctctgcgaagggcgaattc

SEQ ID NO: 433 - protein, 728 aa, unidentified
  source 1..728: note = Adeno-associated virus
MAADGYLPDWLEDNLSEGIREWWDLKPGAPKPKANQQKQDDGRGLVLPGYKYLGPFNGLDKGEPVNEADAAALEHDKAYDKQLEQGDNPYLKYNHADAEFQERLQEDTSFGGNLGRAVFQAKKRVLEPLGLVEEGAKTAPGKKRPIESPDSSTGIGKKGQQPAKKKLNFGQTGDSESVPDPQPIGEPPAGPSGLGSGTMAAGGGAPMADNNEGADGVGNASGNWHCDSTWLGDRVITTSTRTWALPTYNNHLYKQISSQSGATNDNHFFGYSTPWGYFDFNRFHCHFSPRDWQRLINNNWGFRPRKLRFKLFNIQVKEVTTNDGVTTIANNLTSTIQVFSDSEYQLPYVLGSAHQGCLPPFPADVFMIPQYGYLTLNNGSQSVGRSSFYCLEYFPSQMLRTGNNFEFSYTFEEVPFHSSYAHSQSLDRLMNPLIDQYLYYLARTQSTTGSTRELQFHQAGPNTMAEQSKNWLPGPCYRQQRLSKNIDSNNTSNFAWTGATKYHLNGRNSLTNPGVAMATNKDDEDQFFPINGVLVFGKTGAANKTTLENVLMTSEEEIKTTNPVATEQYGVVSSNLQSSTAGPQTQTVNSQGALPGMVWQNRDVYLQGPIWAKIPHTDGNFHPSPLMGGFGLKHPPPQILIKNTPVPANPPEVFTPAKFASFITQYSTGQVSVEIEWELQKENSKRWNPEIQYTSNYAKSNNVEFAVNNEGVYTEPRPIGTRYLTRNL

SEQ ID NO: 434 - DNA, 2504 bp, unidentified
  source 1..2504: mol_type = unassigned DNA; note = Adeno-associated virus
gaattcgccctttctacggctgcgtcaactggaccaatgagaactttcccttcaacgattgcgtcgacaagatggtgatctggtgggaggagggcaagatgacggccaaggtcgtggagtccgccaaggccattcatcatctgctggggcgggctcccgagattgcttgctcggcctgcgatctggtcaacgtggacctggatgactgtgtttctgagcaataaatgacttaaaccaggtatggctgccgatggttatcttccagattggctcgaggacaacctctctgagggcattcgcgagtggtgggacttgaaacctggagccccgaaacccaaagccaaccagcaaaagcaggacgacggccggggtctggtgcttcctggctacaagtacctcggacccttcaacggactcgacaagggagagccggtcaacgaggcagacgccgcggccctcgagcacgacaaggcctacgacaagcagctcgagcagggggacaacccgtacctcaagtacaaccacgccgacgccgagtttcaggagcgtcttcaagaagatacgtcttttgggggcaacctcgggcgagcagtcttccaggccaagaagcgggttctcgaacctctcggtctggttgaggaaggcgctaagacggctcctggaaagaagagacccatagaatcccccgactcctccacgggcatcggcaagaaaggccagcagcccgctaaaaagaagctcaactttgggcagactggcgactcagagtcagtgcccgaccctcaaccaatcggagaaccccccgcaggcccctctggtctgggatctggtacaatggctgcaggcggtggcgctccaatggcagacaataacgaaggcgccgacggagtgggtaatgcctccggaaattggcattgcgattccacatggctgggcgacagagtcatcaccaccagcacccgcacctgggccctgcccacctacaacaaccacctctacaagcagatatcaagtcagagcggggctaccaacgacaaccacttcttcggctacagcaccccctggggctattttgacttcaacagattccactgccacttctcatcacgtgactggcagcgactcatcaacaacaactggggattccggcccaagagactcaacttcaagctcttcaacatccaggtcaaggaggtcacgcagaatgaaggcaccaagaccatcgccaataaccttaccagcacgattcaggtctttacggactcggaataccggctcccgtacgtcctcggctctgcgcaccagggctgcctgcctccgttcccggcggacgtcttcatgattcctcagtacgggtacctgactctgaacaacggcagtcaggccgtgggccgttcctccttctactgcctggagtactttccttctcaaatgctgagaacgggcaacaactttgagttcagctaccagtttgaggacgtgccttttcacagcagctacgcgcacagccaaagcctggaccggctgatgaaccccctcatcgaccagtacctgtactacctgtctcggactcagtccacgggaggtaccgcaggaactcagcagttgctattttctcaggccgggcctaataacatgtcggctcaggccaaaaactggctacccgggccctgctaccggcagcaacgcgtctccacgacactgtcgcaaaataacaacagcaactttgcttggaccggtgccaccaagtatcatctgaatggcagagactctctggtaaatcccggtgtcgctatggcaacgcacaaggacgacgaagagcgattttttccatccagcggagtcttgatgtttgggaaacagggagctggaaaagacaacgtggactatagcagcgttatgctaaccagtgaggaagaaatcaaaaccaccaacccagtggccacagaacagtacggcgtggtggccgataacctgcaacagcaaaacgccgctcctattgtaggggccgtcaacagtcaaggagccttacctggcatggtctggcagaaccgggacgtgtacctgcagggtcctatctgggccaagattcctcacacggacggcaactttcatccttcgccgctgatgggaggctttggactgaaacacccgcctcctcagatcctgattaagaatacacctgttcccgcggatcctccaactaccttcagtcaagccaagccggcgtcgttcatcacgcagtacagcaccggacaggtcagcgtggaaattgaatgggagctgcagaaagagaacagcaagcgctggaacccagagattcagtatacttccaactactacaaatctacaaatgtggactttgctgtcaatactgagggtacttattcagagcctcgccccattggcacccgttacctcacccgtaacctgtaattgcctgttaatcaataaaccggttaattcgtttcagttgaactttggtctctgcgaagggcgaattc

SEQ ID NO: 435 - protein, 731 aa, unidentified
  source 1..731: note = Adeno-associated virus
MAADGYLPDWLEDNLSEGIREWWDLKPGAPKPKANQQKQDDGRGLVLPGYKYLGPFNGLDKGEPVNEADAAALEHDKAYDKQLEQGDNPYLKYNHADAEFQERLQEDTSFGGNLGRAVFQAKKRVLEPLGLVEEGAKTAPGKKRPIESPDSSTGIGKKGQQPAKKKLNFGQTGDSESVPDPQPIGEPPAGPSGLGSGTMAAGGGAPMADNNEGADGVGNASGNWHCDSTWLGDRVITTSTRTWALPTYNNHLYKQISSQSGATNDNHFFGYSTPWGYFDFNRFHCHFSSRDWQRLINNNWGFRPKRLNFKLFNIQVKEVTQNEGTKTIANNLTSTIQVFTDSEYRLPYVLGSAHQGCLPPFPADVFMIPQYGYLTLNNGSQAVGRSSFYCLEYFPSQMLRTGNNFEFSYQFEDVPFHSSYAHSQSLDRLMNPLIDQYLYYLSRTQSTGGTAGTQQLLFSQAGPNNMSAQAKNWLPGPCYRQQRVSTTLSQNNNSNFAWTGATKYHLNGRDSLVNPGVAMATHKDDEERFFPSSGVLMFGKQGAGKDNVDYSSVMLTSEEEIKTTNPVATEQYGVVADNLQQQNAAPIVGAVNSQGALPGMVWQNRDVYLQGPIWAKIPHTDGNFHPSPLMGGFGLKHPPPQILIKNTPVPADPPTTFSQAKPASFITQYSTGQVSVEIEWELQKENSKRWNPEIQYTSNYYKSTNVDFAVNTEGTYSEPRPIGTRYLTRNL

SEQ ID NO: 436 - DNA, 3128 bp, unidentified
  source 1..3128: mol_type = unassigned DNA; note = Adeno-associated virus
gaattcgccctttctacggctgcgtcaactggaccaatgagaactttcccttcaacgattgcgtcgacaagatggtgatctggtgggaggagggcaagatgacggccaaggtcgtggagtccgccaaggccattctcggcggcagcaaggtgcgcgtggaccaaaagtgcaagtcttccgcccagatcgatcccacccccgtgatcgtcacttccaacaccaacatgtgcgccgtgattgacgggaacagcaccaccttcgagcaccagcagccgttacaagaccggatgttcaaatttgaactcacccgccgtctggagcacgactttggcaaggtgacaaagcaggaagtcaaagagttcttccgctgggcgcaggatcacgtgaccgaggtggcgcatgagttctacgtcagaaagggtggagccaacaagagacccgcccccgatgacgcggataaaagcgagcccaagcgggcctgcccctcagtcgcggatccatcgacgtcagacgcggaaggagctccggtggactttgccgacaggtaccaaaacaaatgttctcgtcacgcgggcatgcttcagatgctgtttccctgcaagacatgcgagagaatgaatcagaatttcaacatttgcttcacgcacgggaccagagactgttcagaatgtttccccggcgtgtcagaatctcaaccggtcgtcagaaagaggacgtatcggaaactctgtgccattcatcatctgctagggcgggctcccgagattgcttgctcggcctgcgatctggtcaacgtggacctggatgactgtgtttctgagcaataaatgacttaaaccaggtatggctgccgatggttatcttccagattggctcgaggacaacctctctgagggcattcgcgagtggtgggacttgaaacctggagccccgaaacccaaagccaaccagcaaaagcaggacgacggccggggtctggtgcttcctggctacaagtacctcggacccttcaacggactcgacaagggggagcccgtcaacgcggcggacgcagcggccctcgagcacgacaaggcctacgaccagcagctcaaagcgggtgacaatccgtacctgcggtataaccacgccgacgccgagtttcaggagcgtctgcaagaagatacgtcttttgggggcaacctcgggcgagcagtcttccaggccaagaagcgggttctcgaacctctcggtctggttgaggaaggcgctaagacggctcctggaaagaagagaccggtagagccatcaccccagcgttctccagactcctctacgggcatcggcaagacaggccagcagcccgcgaaaaagagactcaactttgggcagactggcgactcagagtcagtgcccgaccctcaaccaatcggagaaccccccgcaggcccctctggtctgggatctggtacaatggctgcaggcggtggcgctccaatggcagacaataacgaaggcgccgacggagtgggtagttcctcaggaaattggcattgcgattccacatggctgggcgacagagtcatcaccaccagcacccgaacctgggccctccccacctacaacaaccacctctacaagcaaatctccaacgggacatcgggaggaagcaccaacgacaacacctacttcggctacagcaccccctgggggtattttgactttaacagattccactgccacttctcaccacgtgactggcagcgactcatcaacaacaactggggattccggcccaagagactcaacttcaagctcttcaacatccaggtcaaggaggtcacgcagaatgaaggcaccaagaccatcgccaataaccttaccagcacgattcaggtctttacggactcggaataccagctcccgtacgtcctcggctctgcgcaccagggctgcctgcctccgttcccggcggacgtcttcatgattcctcagtacgggtacctgactctgaacaacggcagtcaggccgtgggccgttcctccttctactgcctggagtactttccttctcaaatgctgagaacgggcaacaactttgagttcagctaccagtttgaggacgtgccttttcacagcagctacgcgcacagccaaagcctggaccggctgatgaaccccctcatcgaccagtacctgtactacctgtctcggactcagtccacgggaggtaccgcaggaactcagcagttgctattttctcaggccgggcctaataacatgtcggctcaggccaaaaactggctacccgggccctgctaccggcagcaacgcgtctccacgacactgtcgcaaaataacaacagcaactttgcttggaccggtgccaccaagtatcatctgaatggcagagactctctggtaaatcccggtgtcgctatggcaacgcacaaggacgacgaagagcgattttttccatccagcggagtcttgatgtttgggaaacagggagctggaaaagacaacgtggactatagcagcgttatgctaaccagtgaggaagaaatcaaaaccaccaacccagtggccacagaacagtacggcgtggtggccgataacctgcaacagcaaaacgccgctcctattgtaggggccgtcaacagtcaaggagccttacctggcatggtctggcagaaccgggacgtgtacctgcagggtcctatctgggccaagattcctcacacggacggcaactttcatccttcgccgctgatgggaggctttggactgaaacacccgcctcctcagatcctgattaagaatacacctgttcccgcggatcctccaactaccttcagtcaagccaagctggcgtcgttcatcacgcagtacagcaccggacaggtcagcgtggaaattgaatgggagctgcagaaagagaacagcaagcgctggaacccagagattcagtatacttccaactactacaaatctacaaatgtggactttgctgtcaatactgagggtacttattcagagcctcgccccattggcacccgttacctcacccgtaacctgtaattgcctgttaatcaataaaccggctaattcgtttcagttgaactttggtctctgcgaagggcgaattc

SEQ ID NO: 437 - protein, 738 aa, unidentified
  source 1..738: note = Adeno-associated virus
MAADGYLPDWLEDNLSEGIREWWDLKPGAPKPKANQQKQDDGRGLVLPGYKYLGPFNGLDKGEPVNAADAAALEHDKAYDQQLKAGDNPYLRYNHADAEFQERLQEDTSFGGNLGRAVFQAKKRVLEPLGLVEEGAKTAPGKKRPVEPSPQRSPDSSTGIGKTGQQPAKKRLNFGQTGDSESVPDPQPIGEPPAGPSGLGSGTMAAGGGAPMADNNEGADGVGSSSGNWHCDSTWLGDRVITTSTRTWALPTYNNHLYKQISNGTSGGSTNDNTYFGYSTPWGYFDFNRFHCHFSPRDWQRLINNNWGFRPKRLNFKLFNIQVKEVTQNEGTKTIANNLTSTIQVFTDSEYQLPYVLGSAHQGCLPPFPADVFMIPQYGYLTLNNGSQAVGRSSFYCLEYFPSQMLRTGNNFEFSYQFEDVPFHSSYAHSQSLDRLMNPLIDQYLYYLSRTQSTGGTAGTQQLLFSQAGPNNMSAQAKNWLPGPCYRQQRVSTTLSQNNNSNFAWTGATKYHLNGRDSLVNPGVAMATHKDDEERFFPSSGVLMFGKQGAGKDNVDYSSVMLTSEEEIKTTNPVATEQYGVVADNLQQQNAAPIVGAVNSQGALPGMVWQNRDVYLQGPIWAKIPHTDGNFHPSPLMGGFGLKHPPPQILIKNTPVPADPPTTFSQAKLASFITQYSTGQVSVEIEWELQKENSKRWNPEIQYTSNYYKSTNVDFAVNTEGTYSEPRPIGTRYLTRNL

SEQ ID NO: 438 - DNA, 3084 bp, unidentified
  source 1..3084: mol_type = unassigned DNA; note = Adeno-associated virus
gaattcgccctttctacggctgcatcaactggaccaatgagaactttcccttcaacgattgcgtcgacaagatggtgatctggtgggaggagggcaagatgacggccaaggtcgtggagtccgccaaggccattctcggcggcagcaaggtgcgcgtggaccaaaagtgcaagtcgtccgcccagatcgaccccacccccgtgatcgtcacctccaacaccaacatgtgcgccgtgattgacgggaacagcaccaccttcgagcaccagcagccgttgcaggaccggatgttcaagttcgaactcacccgccgtctggagcacgactttggcaaggtgaccaagcaggaagtcaaagagttcttccgctgggcgcaggatcacgtgaccgaggtggcgcatgagttctacgtcagaaagggcggagccagcaaaagacccgcccccgatgacgcggatataagcgagcccaagcgggcctgcccctcagtcgcggatccatcgacgtcagacgcggaaggagctccggtggactttgccgacaggtaccaaaacaaatgttctcgtcacgcgggcatgcttcagatgctgtttccctgcaaaacgtgcgagaaaatgaatcagaatttcaacatttgcttcacgcacggggtcagagactgctcagaatgtttccccggtgcatcagaatctcaaccggtcgtcagaaaaaaaacgtatcagaaactgtgtgccattcatcatctgctggggcgggcacccgagattgcttgctcggcctgcgatctggtcaacgtggacctggacgactgtgtttctgagcaataaatgacttaaaccaggtatggctgccgatggttatcttccagattggcttgaggacaacctctctgagggcattcgcgagtggtgggacctgaaacctggagccccgaaacccaaagccaaccagcaaaagcaggacgacggccggggtctggtgcttcctggctacaagtacctcggacccttcaacggactcgacaagggggagcccgtcaacgcggcggacgcagcggccctcgagcacgacaaggcctacgaccagcagctcaaagcgggtgacaatccgtacctgcggtataaccacgccgacgccgagtttcaggagcgtctgcaagaagatacgtcttttgggggcaacctcgggcgagcagtcttccaggccaagaagcgggttctcgaacctctcggtctggttgaggaaggcgctaagacggctcctggaaagaagagaccggtagagccatcacctcagcgttcccccgactcctccacgggcatcggcaagaaaggccaccagcccgcgagaaagagactgaactttgggcagactggcgactcggagtcagtccccgaccctcaaccaatcggagaaccaccagcaggcccctctggtctgggatctggtacaatggctgcaggcggtggcgctccaatggcagacaataacgaaggcgccgacggagtgggtagttcctcaggaaattggcattgcgattccacatggctgggcgacagagtcatcaccaccagcacccgaacctgggccctgcccacctacaacaaccatctctacaagcaaatctccaacgggacatcgggaggaagcactaacgacaacacctactttggctacagcaccccctgggggtattttgacttcaacagattccactgccacttctcaccacgtgactggcagcgactcatcaacaataactggggattccggcccaagagactcaacttcaagctcttcaacatccaggtcaaggaggtcacgcagaatgaaggcaccaagaccatcgccaataaccttaccagcacgattcaggtgtttacggactcggaataccagctcccgtacgtccccggctctgcgcaccagggctgcctccctccgttcccggcggacgtcttcatgattcctcagtacgggtatctgaccctaaacaatggcagtcaggctgtgggccgttcctccttctactgcctggaatacttcccttctcaaatgctgaggacgggcaacaactttgaattcagctacaccttcgaggacgtgcctttccacagcagctacgcgcacagccagagcctggaccggctgatgaaccctctcatcgaccagtacctgtattacttatccagaactcagtccacaggaggaactcaaggtactcagcaattgttattttctcaagccgggcccgcaaacatgtcggctcaggccaagaactggctacctggaccgtgttaccgtcagcaacgagtttccacgacactgtcgcaaaacaacaacagcaattttgcttggaccggtgccaccaagtatcacctgaatggcagagactccctggttaatcccggcgttgccatggctacccacaaggacgacgaggagcgcttcttcccgtcaagcggagttctaatgtttggcaagcagggggctggaaaagacaatgtggactacagcagcgtgatgctcaccagcgaagaagaaattaaaactactaacccagtggctacagagcagtatggtgtggtggcagacaacctgcagcagaccaacggagctcccattgtgggaactgtcaacagccagggggccttacctggtatggtctggcaaaaccgggacgtgtacctgcagggccccatctgggccaaaattcctcacacggacggcaactttcatccttcgccgctgatgggaggctttggactgaaacacccgcctcctcagatcctggtgaaaaacactcctgttcctgcggatcctccgaccaccttcagccaggccaagctggcttcttttatcacgcagtacagcaccggacaggtcagcgtggaaatcgaatgggagctgcagaaagaaaacagcaagcgctggaacccagagattcagtatacttccaactactacaaatctacaaatgtggactttgctgtcaatactgagggtacttattcagagcctcgccccattggcactcgttatctcacccgtaatctgtaattgcttgttaatcaataaaccggt

SEQ ID NO: 439 - protein, 738 aa, unidentified
  source 1..738: note = Adeno-associated virus
MAADGYLPDWLEDNLSEGIREWWDLKPGAPKPKANQQKQDDGRGLVLPGYKYLGPFNGLDKGEPVNAADAAALEHDKAYDQQLKAGDNPYLRYNHADAEFQERLQEDTSFGGNLGRAVFQAKKRVLEPLGLVEEGAKTAPGKKRPVEPSPQRSPDSSTGIGKKGHQPARKRLNFGQTGDSESVPDPQPIGEPPAGPSGLGSGTMAAGGGAPMADNNEGADGVGSSSGNWHCDSTWLGDRVITTSTRTWALPTYNNHLYKQISNGTSGGSTNDNTYFGYSTPWGYFDFNRFHCHFSPRDWQRLINNNWGFRPKRLNFKLFNIQVKEVTQNEGTKTIANNLTSTIQVFTDSEYQLPYVPGSAHQGCLPPFPADVFMIPQYGYLTLNNGSQAVGRSSFYCLEYFPSQMLRTGNNFEFSYTFEDVPFHSSYAHSQSLDRLMNPLIDQYLYYLSRTQSTGGTQGTQQLLFSQAGPANMSAQAKNWLPGPCYRQQRVSTTLSQNNNSNFAWTGATKYHLNGRDSLVNPGVAMATHKDDEERFFPSSGVLMFGKQGAGKDNVDYSSVMLTSEEEIKTTNPVATEQYGVVADNLQQTNGAPIVGTVNSQGALPGMVWQNRDVYLQGPIWAKIPHTDGNFHPSPLMGGFGLKHPPPQILVKNTPVPADPPTTFSQAKLASFITQYSTGQVSVEIEWELQKENSKRWNPEIQYTSNYYKSTNVDFAVNTEGTYSEPRPIGTRYLTRNL

SEQ ID NO: 440 - DNA, 3123 bp, unidentified
  source 1..3123: mol_type = unassigned DNA; note = Adeno-associated virus
gaattcgcccttggctgcgtcaactggaccaatgagaactttcccttcaacgattgcgtcgacaagatggtgatctggtgggaggagggcaagatgacggccaaggtcgtggagtccgccaaggccattctcggcggcagcaaggtgcgcgtggaccaaaagtgcaagtcgtccgcccagatcgaccccacccccgtgatcgtcacctccaacaccaacatgtgcgccgtgattgacgggaacagcaccaccttcgagcaccagcagccgttgcaggaccggatgttcaagttcgaactcacccgccgtctggagcacgactttggcaaggtgaccaagcaggaagtcaaagagttcttccgctgggcgcaggatcacgtgaccgaggtggcgcatgagttctacgtcagaaagggcggagccagcaaaagacccgcccccgatgacgcggatataagcgagcccaagcgggcctgcccctcagtcgcggatccatcgacgtcagacgcggaaggagctccggtggactttgccgacaggtaccaaaacaaatgttctcgtcacgcgggcatgctccagatgctgtttccctgcaaaacgtgcgagagaatgaatcagaatttcaacatttgcttcacgcacggggtcagagactgctcagaatgtttccccggtgcatcagaatctcaaccggtcgtcagaaaaaaaacgtatcagaaactgtgtgccattcatcatctgctggggcgggcacccgagattgcttgctcggcctgcgatctggtcaacgtggacctggacgactgtgtttctgagcaataaatgacttaaaccaggtatggctgccgatggttatcttccagattggcttgaggacaacctctctgagggcattcgcgagtggtgggacctgaaacctggagccccgaaacccaaagccaaccagcaaaagcaggacgacggccggggtctggtgcttcctggctacaagtacctcggacccttcaacggactcgacaagggggagcccgtcaacgcggcggacgcagcggccctcgagcacgacaaggcctacgaccagcagctcaaagcgggtgacaatccgtacctgcggtataaccacgccgacgccgagtttcaggagcgtctgcaagaagatacgtcttttgggggcaacctcgggcgagcagtcttccaggccaagaagcgggttctcgaacctctcggtctggttgaggaaggcgctaagacggctcctggaaagaagagaccggtagagccatcacctcagcgttcccccgactcctccacgggcatcggcaagaaaggccaccagcccgcgagaaagagactgaactttgggcagactggcgactcggagtcagtccccgaccctcaaccaatcggagaaccaccagcaggcccctctggtctgggatctggtacaatggctgcaggcggtggcgctccaatggcagacaataacgaaggcgccgacggagtgggtagttcctcaggaaattggcattgcgattccacatggctgggcgacagagtcatcaccaccagcacccgaacctgggccctgcccacctacaacaaccatctctacaagcaaatctccaacgggacatcgggaggaagcactaacgacaacacctactttggctacagcaccccctgggggtattttgacttcaacagattccactgccacttctcaccacgtgactggcagcgactcatcaacaataactggggattccggcccaagagactcaacttcaagctcttcaacatccaggtcaaggaggtcacgcagaatgaaggcaccaagaccatcgccaataaccttaccagcacgattcaggtgtttacggactcggaataccagctcccgtacgtcctcggctctgcgcaccagggctgcctccctccgttcccggcggacgtcttcatgattcctcagtacgggtatctgaccctaaacaatggcagtcaggctgtgggccgttcctccttctactgcctggaatacttcccttctcaaatgctgaggacgggcaacaactttgaattcagctacaccttcgaggacgtgcctttccacagcagctacgcgcacagccagagcctggaccggctgatgaaccctctcatcgaccagtacctgtattacttatccagaactcagtccacaggaggaactcaaggtactcagcaattgttattttctcaagccgggcccgcaaacatgtcggctcaggccaagaactggctacctggaccgtgttaccgtcagcaacgagtttccacgacactgtcgcaaaacaacaacagcaattttgcttggaccggtgccaccaagtatcacctgaatggcagagactccctggttaatcccggcgttgccatggctacccacaaggacgacgaggagcgcttcttcccgtcaagcggagttctaatgtttggcaagcagggggctggaaaagacaatgtggactacagcagcgtgatgctcaccagcgaagaagaaattaaaactactaacccagtggctacagagcagtatggtgtggtggcagacaacctgcagcagaccaacggagctcccattgtgggaactgtcaacagccagggggccttacctggtatggtctggcaaaaccgggacgtgtacctgcagggccccatctgggccaaaattcctcacacggacggcaactttcatccttcgccgctgatgggaggctttggactgaaacacccgcctcctcagatcctggtgaaaaacactcctgttcctgcggatcctccgaccaccttcagccaggccaagctggcttcttttatcacgcagtacagcaccggacaggtcagcgtggaaatcgaatgggagctgcagaaagaaaacagcaagcgctggaacccagagattcagtatacttccaactactacaaatctacaaatgtggactttgctgtcaatactgagggtacttattcagagcctcgccccattggcactcgttatctcacccgtaatctgtaattgcttgttaatcaataaaccggttaattcgtttcagttgaactttggtctctgcgaagggcgaattc

SEQ ID NO: 441 - protein, 738 aa, unidentified
  source 1..738: note = Adeno-associated virus
MAADGYLPDWLEDNLSEGIREWWDLKPGAPKPKANQQKQDDGRGLVLPGYKYLGPFNGLDKGEPVNAADAAALEHDKAYDQQLKAGDNPYLRYNHADAEFQERLQEDTSFGGNLGRAVFQAKKRVLEPLGLVEEGAKTAPGKKRPVEPSPQRSPDSSTGIGKKGHQPARKRLNFGQTGDSESVPDPQPIGEPPAGPSGLGSGTMAAGGGAPMADNNEGADGVGSSSGNWHCDSTWLGDRVITTSTRTWALPTYNNHLYKQISNGTSGGSTNDNTYFGYSTPWGYFDFNRFHCHFSPRDWQRLINNNWGFRPKRLNFKLFNIQVKEVTQNEGTKTIANNLTSTIQVFTDSEYQLPYVLGSAHQGCLPPFPADVFMIPQYGYLTLNNGSQAVGRSSFYCLEYFPSQMLRTGNNFEFSYTFEDVPFHSSYAHSQSLDRLMNPLIDQYLYYLSRTQSTGGTQGTQQLLFSQAGPANMSAQAKNWLPGPCYRQQRVSTTLSQNNNSNFAWTGATKYHLNGRDSLVNPGVAMATHKDDEERFFPSSGVLMFGKQGAGKDNVDYSSVMLTSEEEIKTTNPVATEQYGVVADNLQQTNGAPIVGTVNSQGALPGMVWQNRDVYLQGPIWAKIPHTDGNFHPSPLMGGFGLKHPPPQILVKNTPVPADPPTTFSQAKLASFITQYSTGQVSVEIEWELQKENSKRWNPEIQYTSNYYKSTNVDFAVNTEGTYSEPRPIGTRYLTRNL

SEQ ID NO: 442 - DNA, 3122 bp, unidentified
  source 1..3122: mol_type = unassigned DNA; note = Adeno-associated virus
gaattcgccctttctacggctgcgtcaactggaccaatgagaactttcccttcaacgattgcgtcgacaagatggtgatctggtgggaggagggcaagatgacggccaaggtcgtggagtccgccaaggccattctcggcggcagcaaggtgcgtgtggaccaaaagtgcaagtcttccgcccagatcgatcccacccccgtgatcgtcacctccaacaccaacatgtgcgccgtgattgacgggaacagcgccaccttcgagcaccagcagccgttgcaggaccggatgttcaaatttgaactcacccgccgtctggagcatgactttggcaaggtgacgaagcaggaagtcaaagagttcttccgctgggcgcaggatcacgtgaccgaggtggcgcatgagttccacgtcagaaagggtggagccaacaagagacccgcccccgatgacgcggatataagcgagcccaagcgggcctgcccctcagtcgcggatccatcgacgtcagacgcggaaggagctccggtggactttgccgacaggtaccaaaacaaatgttctcgtcacgcgggcatgcttcagatgctgtttccctgcaagacatgcgagagaatgaatcagaatttcaacatttgcttcacgcacgggaccagagactgttcagaatgtttccccggcgtgtcagaatctcaaccggtcgtcagaaagaggacgtatcggaaactctgtgcgattcatcatctgctggggcgggctcccgagattgcttgctcggcctgcgatctggtcaacgtggacctggatgactgtgtttctgagcaataaatgacttaaaccaggtatggctgccgatggttatcttccagattggctcgaggacaacctctctgagggcattcgcgagtggtgggacttgaaacctggagccccgaaacccaaagccaaccagcaaaagcaggacgacggccggggtctggtgcttcctggctacaagtacctcggacccttcaacggactcgacaagggggagcccgtcaacgcggcggacgcagcggccctcgagcacgacaaagcctacgaccagcagctcaaagcgggtgacaatccgtacctgcggtataatcacgccgacgccgagtttcaggagcgtctgcaagaagatacgtcttttgggggcaacctcgggcgagcagtcttccaggccaagaagcgggttctcgaacctctcggtctggttgaggaaggcgctaagacggctcctggaaagaagagactggtagagcagtcgccacaagagccagactcctcctcgggcatcggcaagacaggccagcagcccgctaaaaagagactcaattttggtcagactggcgactcagagtcagtccccgacccacaacctctcggagaacctccagcagccccctcaggtctgggacctaatacaatggcttcaggcggtggcgctccaatggcagacaataacgaaggcgccgacggagtgggtaattcctcgggaaattggcattgcgattccacatggctgggggacagagtcatcaccaccagcacccgaacctgggccctgcccacctacaacaaccacctctacaagcaaatctccaacggcacctcgggaggaagcaccaacgacaacacctattttggctacagcaccccctgggggtattttgacttcaacagattccactgtcacttttcaccacgtgactggcaacgactcatcaacaacaattggggattccggcccaaaagactcaacttcaagctgttcaacatccaggtcaaggaagtcacgacgaacgaaggcaccaagaccatcgccaataatctcaccagcaccgtgcaggtctttacggactcggagtaccagttaccgtacgtgctaggatccgctcaccagggatgtctgcctccgttcccggcggacgtcttcacggttcctcagtacggctatttaactttaaacaatggaagccaagccctgggacgttcctccttctactgtctggagtatttcccatcgcagatgctgagaaccggcaacaactttcagttcagctacaccttcgaggacgtgcctttccacagcagctacgcgcacagccagagcctggacaggctgatgaatcccctcatcgaccagtacctgtactacctggtcagaacgcaaacgactggaactggagggacgcagactctggcattcagccaagcgggtcctagctcaatggccaaccaggctagaaattgggtgcccggaccttgctaccggcagcagcgcgtctccacgacaaccaaccagaacaacaacagcaactttgcctggacgggagctgccaagtttaagctgaacggccgagactctctaatgaatccgggcgtggcaatggcttcccacaaggatgacgacgaccgcttcttcccttcgagcggggtcctgatttttggcaagcaaggagccgggaacgatggagtggattacagccaagtgctgattacagatgaggaagaaatcaaggctaccaaccccgtggccacagaagaatatggagcagtggccatcaacaaccaggccgccaatacgcaggcgcagaccggactcgtgcacaaccagggggtgattcccggcatggtgtggcagaatagagacgtgtacctgcagggtcccatctgggccaaaattcctcacacggacggcaactttcacccgtctcccctgatgggcggctttggactgaagcacccgcctcctcaaattctcatcaagaacacaccggttccagcggacccgccgcttaccttcaaccaggccaagctgaactctttcatcacgcagtacagcaccggacaggtcagcgtggaaatcgagtgggagctgcagaaagaaaacagcaaacgctggaatccagagattcaatacacttccaactactacaaatctacaaatgtggactttgctgtcaacacggaaggagtttatagcgagcctcgccccattggcacccgttacctcacccgcaacctgtaattacatgttaatcaataaaccggttaattcgtttcagttgaactttggtctctgcgaagggcgaattc

SEQ ID NO: 443 - protein, 736 aa, unidentified
  source 1..736: note = Adeno-associated virus
MAADGYLPDWLEDNLSEGIREWWDLKPGAPKPKANQQKQDDGRGLVLPGYKYLGPFNGLDKGEPVNAADAAALEHDKAYDQQLKAGDNPYLRYNHADAEFQERLQEDTSFGGNLGRAVFQAKKRVLEPLGLVEEGAKTAPGKKRLVEQSPQEPDSSSGIGKTGQQPAKKRLNFGQTGDSESVPDPQPLGEPPAAPSGLGPNTMASGGGAPMADNNEGADGVGNSSGNWHCDSTWLGDRVITTSTRTWALPTYNNHLYKQISNGTSGGSTNDNTYFGYSTPWGYFDFNRFHCHFSPRDWQRLINNNWGFRPKRLNFKLFNIQVKEVTTNEGTKTIANNLTSTVQVFTDSEYQLPYVLGSAHQGCLPPFPADVFTVPQYGYLTLNNGSQALGRSSFYCLEYFPSQMLRTGNNFQFSYTFEDVPFHSSYAHSQSLDRLMNPLIDQYLYYLVRTQTTGTGGTQTLAFSQAGPSSMANQARNWVPGPCYRQQRVSTTTNQNNNSNFAWTGAAKFKLNGRDSLMNPGVAMASHKDDDDRFFPSSGVLIFGKQGAGNDGVDYSQVLITDEEEIKATNPVATEEYGAVAINNQAANTQAQTGLVHNQGVIPGMVWQNRDVYLQGPIWAKIPHTDGNFHPSPLMGGFGLKHPPPQILIKNTPVPADPPLTFNQAKLNSFITQYSTGQVSVEIEWELQKENSKRWNPEIQYTSNYYKSTNVDFAVNTEGVYSEPRPIGTRYLTRNL

SEQ ID NO: 444 - DNA, 3117 bp, unidentified
  source 1..3117: mol_type = unassigned DNA; note = Adeno-associated virus
gaattcgcccttggctgcgtcaactggaccaatgagaactttcccttcaacgattgcgtcgacaagatggtgatctggtgggaggagggcaagatgacggccaaggtcgtggagtccgccaaggccattctcggcggcagcaaggtgcgtgtggaccaaaagtgcaagtcttccgcccagatcgatcccacccccgtgatcgtcacctccaacaccaacatgtgcgccgtgattgacgggaacagcaccaccttcgagcaccagcagccgttgcaggaccggatgttcaaatttgaactcacccgccgtctggagcatgactttggcaaggtgacgaagcaggaagtcaaagagttcttccgctgggcgcaggatcacgtgaccgaggtggcgcatgagttccacgtcagaaagggtggagccaacaagagacccgcccccgatgacgcggatataagcgagcccaagcgggcctgcccctcagtcgcggatccatcgacgtcagacgcggaaggagctccggtggactttgccgacaggtaccaaaacaaatgttctcgtcacgcgggcatgcttcagatgctgtttccctgcaagacatgcgagagaatgaatcagaatttcaacatttgcttcacgcacgggaccagagactgttcagaatgtttccccggcgtgtcagaatctcaaccggtcgtcagaaagaggacgtatcggaaactctgtgcgattcatcatctgctggggcgggctcccgagattgcttgctcggcctgcgatctggtcaacgtggacctggatgactgtgtttctgagcaataaatgacttaaaccaggtatggctgccgatggttatcttccagattggctcgaggacaacctctctgagggcattcgcgagtggtgggacttgaaacctggagccccgaaacccaaagccaaccagcaaaagcaggacgacggccggggtctggtgcttcctggctacaagtacctcggacccttcaacggactcgacaagggggagcccgtcaacgcggcggacgcagcggccctcgagcacgacaaagcctacgaccagcagctcaaagcgggtgacaatccgtacctgcggtataatcacgccgacgccgagtttcaggagcgtctgcaagaagatacgtcttttgggggcaacctcgggcgagcagtcttccaggccaagaagcgggttctcgaacctctcggtctggttgaggaaggcgctaagacggctcctggaaagaagagaccggtagagcagtcgccacaagagccagactcctcctcgggcatcggcaagacaggccagcagcccgctaaaaagagactcaattttggtcagactggcgactcagagtcagtccccgacccacaacctctcggagaacctccagcagccccctcaggtctgggacctaatacaatggcttcaggcggtggcgctccaatggcagacaataacgaaggcgccgacggagtgggtaattcctcgggaaattggcattgcgattccacatggctgggggacagagtcatcaccaccagcacccgaacctgggccctgcccacctacaacaaccacctctacaagcaaatctccaacggcacctcgggaggaagcaccaacgacaacacctattttggctacagcaccccctgggggtattttgacttcaacagattccactgtcacttttcaccacgtgactggcaacgactcatcaacaacaattggggattccggcccaaaagactcaacttcaagctgttcaacatccaggtcaaggaagtcacgacgaacgaaggcaccaagaccatcgccaataatctcaccagcaccgtgcgggtctttacggactcggagtaccagttaccgtacgtgctaggatccgctcaccagggatgtctgcctccgttcccggcggacgtcttcatggttcctcagtacggctatttaactttaaacaatggaagccaagccctgggacgttcctccttctactgtctggagtatttcccatcgcagatgctgagaaccggcaacaactttcagttcagctacaccttcgaggacgtgcctttccacagcagctacgcgcacagccagagcctggacaggctgatgaatcccctcatcgaccagtacctgtactacctggtcagaacgcaaacgactggaactggagggacgcagactctggcattcagccaagcgggtcctagctcaatggccaaccaggctagaaattgggtgcccggaccttgctaccggcagcagcgcgtctccacgacaaccaaccagagcaacaacagcaactttgcctggacgggagctgccaagtttaagctgaacggccgagactctctaatgaatccgggcgtggcaatggcttcccacaaggatgacgacgaccgcttcttcccttcgagcggggtcctgatttttggcaagcaaggagccgggaacgatggagtggattacagccaagtgctgattacagatgaggaagaaatcaaggctaccaaccccgtggccacagaagaatatggagcagtggccatcaacaaccaggccgccaatacgcaggcgcagaccggactcgtgcacaaccagggggtgattcccggcatggtgtggcagaatagagacgtgtacctgcagggtcccatctgggccaaaattcctcacacggacggcaactttcacccgtctcccctgatgggcggctttggactgaagcacccgcctcctcaaattctcatcaagaacacaccggttccagcggacccgccgcttaccttcaaccaggccaagctgaactctttcatcacgcagtacagcaccggacaggtcagcgtggaaatcgagtgggagctgcagaaagaaaacagcaaacgctggaatccagagattcaatacacttccaactactacaaatctacaaatgtggactttgctgtcaacacggaaggagtttatagcgagcctcgccccattggcacccgttacctcacccgcaacctgtaattacatgttaatcaataaaccggttaattcgtttcagttgaactttggtctctgcgaagggcgaattc

SEQ ID NO: 445 - protein, 736 aa, unidentified
  source 1..736: note = Adeno-associated virus
MAADGYLPDWLEDNLSEGIREWWDLKPGAPKPKANQQKQDDGRGLVLPGYKYLGPFNGLDKGEPVNAADAAALEHDKAYDQQLKAGDNPYLRYNHADAEFQERLQEDTSFGGNLGRAVFQAKKRVLEPLGLVEEGAKTAPGKKRPVEQSPQEPDSSSGIGKTGQQPAKKRLNFGQTGDSESVPDPQPLGEPPAAPSGLGPNTMASGGGAPMADNNEGADGVGNSSGNWHCDSTWLGDRVITTSTRTWALPTYNNHLYKQISNGTSGGSTNDNTYFGYSTPWGYFDFNRFHCHFSPRDWQRLINNNWGFRPKRLNFKLFNIQVKEVTTNEGTKTIANNLTSTVRVFTDSEYQLPYVLGSAHQGCLPPFPADVFMVPQYGYLTLNNGSQALGRSSFYCLEYFPSQMLRTGNNFQFSYTFEDVPFHSSYAHSQSLDRLMNPLIDQYLYYLVRTQTTGTGGTQTLAFSQAGPSSMANQARNWVPGPCYRQQRVSTTTNQSNNSNFAWTGAAKFKLNGRDSLMNPGVAMASHKDDDDRFFPSSGVLIFGKQGAGNDGVDYSQVLITDEEEIKATNPVATEEYGAVAINNQAANTQAQTGLVHNQGVIPGMVWQNRDVYLQGPIWAKIPHTDGNFHPSPLMGGFGLKHPPPQILIKNTPVPADPPLTFNQAKLNSFITQYSTGQVSVEIEWELQKENSKRWNPEIQYTSNYYKSTNVDFAVNTEGVYSEPRPIGTRYLTRNL

SEQ ID NO: 446 - DNA, 3121 bp, unidentified
  source 1..3121: mol_type = unassigned DNA; note = Adeno-associated virus
gaattcgcccttctacggctgcgtcaactggaccaatgagaactttcccttcaacgattgcgtcgacaagatggtgatctggtgggaggagggcaagatgacggccaaggtcgtggagtccgccaaggccattctcggcggcagcaaggtgcgtgtggaccaaaagtgcaagtcttccgcccagatcgatcccacccccgtgatcgtcacctccaacaccaacatgtgcgccgtgattgacgggaacagcaccaccttcgagcaccagcagccgttgcaggaccggatgttcaaatttgaactcacccgccgtctggagcatgactttggcaaggtgacgaagcaggaagtcaaagagttcttccgctgggcgcaggatcacgtgaccgaggtggcgcatgagttccacgtcagaaagggtggcgccaacaagagacccgcccccgatgacgcggatataagcgagcccaagcgggcctgcccctcagtcgcggatccatcgacgtcagacgcggaaggagctccggtggactttgccgacaggtaccaaaacaaatgttctcgtcacgcgggcatgcttcagatgctgtttccctgcaagacatgcgagagaatgaatcagaatttcaacatttgcttcacgcacgggaccagagactgttcagaatgtttccccggcgtgtcagaatctcaaccggtcgtcagaaagaggacgtatcggaaactctgtgcgattcatcatctgctggggcgggctcccgagattgcttgctcggcctgcgatctggtcaacgtggacctggatgactgtgtttctgagcaataaatgacttaaaccaggtatggctgccgatggttatcttccagattggctcgaggacaacctctctgagggcattcgcgagtggtgggacttgaaacctggagccccgaaacccaaagccaaccagcaaaagcaggacgacggccggggtctggtgcttcctggctacaagtacctcggacccttcaacggactcgacaagggggagcccgtcaacgcggcggacgcagcggccctcgagcacgacaaagcctacgaccagcagctcaaagcgggtgacaatccgtacctgcggtataatcacgccgacgccgagtttcaggagcgtctgcaagaagatacgtcctttgggggcaacctcgggcgagcagtcttccaggccaagaagcgggttctcgaacctctcggtctggttgaggaaggcgctaagacggctcctggaaagaagagaccggtagagcagtcgccacaagagccagactcctcctcgggcatcggcaagacaggccagcagcccgctaaaaagagactcaattttggtcagactggcgactcagagtcagtccccgacccacaacctctcggagaacctccagcagccccctcaggtctgggacctaatacaatggcttcaggcggtggcgctccaatggcagacaataacgaaggcgccgacggagtgggtaattcctcgggaaattggcattgcgattccacatggctgggggacagagtcatcaccaccagcacccgaacctgggccctgcccacctacaacaaccacctctacaagcaaatctccaacggcacctcgggaggaagcaccaacgacaacacctattttggctacagcaccccctgggggtattttgacttcaacagattccactgtcacttttcaccacgtgactggcaacgactcatcaacaacaattggggattccggcccaaaagactcaacttcaagctgttcaacatccaggtcaaggaagtcacgacgaacgaaggcaccaagaccatcgccaataatctcaccagcaccgtgcaggtctttacggacttggagtaccagttaccgtacgtgctaggatccgctcaccagggatgtctgcctccgttcccggcggacgtcttcatggttcctcagtacggctatttaactttaaacaatggaagccaagccctgggacgttcctccttctactgtctggagtatttcccatcgcagatgccgagaaccggcaacaactttcagttcagctacaccttcgaggacgtgcctttccacagcagctacgcgcacagccagagcctggacaggctgatgaatcccctcatcgaccagtacctgtactacctggtcagaacgcaaacgactggaactggagggacgcagactctggcattcagccaagcgggtcctagctcaatggccaaccaggctagaaattgggtgcccggaccttgctaccggcagcagcgcgtctccacgacaaccaaccagaacaacaacagcaactttgcctggacgggagctgccaagtttaagctgaacggccgagactctctaatgaatccgggcgtggcaatggcttcccacaaggatgacgacgaccgcttcttcccttcgagcggggtcctgatttttggcaagcaaggagccgggaacgatggagtggattacagccaagtgctgattacagatgaggaagaaatcaaggctaccaaccccgtggccacagaagaatatggagcagtggccatcaacaaccaggccgccaatacgcaggcgcagaccggactcgtgcacaaccagggggtgattcccggcatggtgtggcagaatagagacgtgtacctgcagggtcccatctgggccaaaattcctcacacggacggcaactttcacccgtctcccctgatgggcggctttggactgaagcacccgcctcctcaaattctcatcaagaacacaccggttccagcggacccgccgcttaccttcaaccaggccaagctgaactctttcatcacgcagtacagcaccggacaggtcagcgtggaaatcgagtgggagctgcagaaagaaaacagcaaacgctggaatccagagattcaatacacttccaactactacaaatctacaaatgtggactttgctgtcaacacggaaggagtttatagcgagcctcgccccattggcacccgttacctcacccgcaacctgtaattacatgttaatcaataaaccggttaattcgtttcagttgaactttggtctctgcgaagggcgaattc

SEQ ID NO: 447 - protein, 736 aa, unidentified
  source 1..736: note = Adeno-associated virus
MAADGYLPDWLEDNLSEGIREWWDLKPGAPKPKANQQKQDDGRGLVLPGYKYLGPFNGLDKGEPVNAADAAALEHDKAYDQQLKAGDNPYLRYNHADAEFQERLQEDTSFGGNLGRAVFQAKKRVLEPLGLVEEGAKTAPGKKRPVEQSPQEPDSSSGIGKTGQQPAKKRLNFGQTGDSESVPDPQPLGEPPAAPSGLGPNTMASGGGAPMADNNEGADGVGNSSGNWHCDSTWLGDRVITTSTRTWALPTYNNHLYKQISNGTSGGSTNDNTYFGYSTPWGYFDFNRFHCHFSPRDWQRLINNNWGFRPKRLNFKLFNIQVKEVTTNEGTKTIANNLTSTVQVFTDLEYQLPYVLGSAHQGCLPPFPADVFMVPQYGYLTLNNGSQALGRSSFYCLEYFPSQMPRTGNNFQFSYTFEDVPFHSSYAHSQSLDRLMNPLIDQYLYYLVRTQTTGTGGTQTLAFSQAGPSSMANQARNWVPGPCYRQQRVSTTTNQNNNSNFAWTGAAKFKLNGRDSLMNPGVAMASHKDDDDRFFPSSGVLIFGKQGAGNDGVDYSQVLITDEEEIKATNPVATEEYGAVAINNQAANTQAQTGLVHNQGVIPGMVWQNRDVYLQGPIWAKIPHTDGNFHPSPLMGGFGLKHPPPQILIKNTPVPADPPLTFNQAKLNSFITQYSTGQVSVEIEWELQKENSKRWNPEIQYTSNYYKSTNVDFAVNTEGVYSEPRPIGTRYLTRNL

SEQ ID NO: 448 - DNA, 3122 bp, unidentified
  source 1..3122: mol_type = unassigned DNA; note = Adeno-associated virus
gaattcgccctttctacggctgcgtcaactggaccaatgagaactttcccttcaacgattgcgtcgacaagatggtgatctggtgggaggagggcaagatgacggccaaggtcgtggagtccgccaaggccattctcggcggcagcaaggtgcgtgtggaccaaaagtgcaagtcttccgcccagatcgatcccacccccgtgatcgtcacctccaacaccaacatgtgcgccgtgattgacgggaacagcaccaccttcgagcaccagcagccgttgcaggaccggatgttcaaatttgaactcacccgccgtctggagcatgactttggcaaggtgacgaagcaggaagtcaaagggttcttccgctgggcgcaggatcacgtgaccgaggtggcgcatgagttccacgtgcgagcccaagcgggcctgcccctcagtcgcggatccatcgacgtcagaccagaaagggtggagccaacaagagacccgcccccgatgacgcggatataagcggaaggagctccggtggactttgccgacaggtaccaaaacaaatgttctcgtcacgcgggcatgcttcagatgctgtttccctgcaagacatgcgagagaatgaatcagaatttcaacatttgcttcacgcacgggaccagagactgttcagaatgtttccccggcgtgtcagaatctcaaccggtcgtcagaaagaggacgtatcggaaactctgtgcgattcatcatctgctggggcgggctcccgagattgcttgctcggcctgcgatctggtcaacgtggacctggatgactgtgtttctgagcaataaatgacttaaaccaggtatggctgccgatggttatcttccagattggctcgaggacaacctctctgagggcattcgcgagtggtgggacttgaaacctggagccccgaaacccaaagccaaccagcaaaagcaggacgacggccggggtctggtgcttcctggctacaagtacctcggacccttcaacggactcgacaagggggagcccgtcaacgcggcggacgcagcggccctcgagcacgacaaagcctacgaccagcagctcaaagcgggtgacaatccgtacctgcggtataatcacgccgacgccgagtttcaggagcgtctgcaagaagatacgtcttttgggggcaacctcgggcgagcagtcttccaggccaagaagcgggttctcgaacctctcggtctggttgaggaaggcgctaagacggctcctggaaagaagagaccggtagagcagtcgccacaagagccagactcctcctcgggcatcggcaagacaggccagcagcccgctaaaaagagactcaattttggtcagactggcgactcagagtcagtccccgacccacaacctctcggagaacctccagcagccccctcaggtctgggacctaatacaatggcttcaggcggtggcgctccaatggcagacaataacgaaggcgccgacggagtgggtaattcctcgggaaattggcattgcgattccacatggctgggggacagagtcatcaccaccagcacccgaacctgggccctgcccacctacaacaaccacctctacaagcaaatctccaacggcacctcgggaggaagcaccaacgacaacacctattttggctacagcaccccctgggggtattttgacttcaacagattccactgtcacttttcaccacgtgactggcaacgactcatcaacaacaattggggattccggcccaaaagactcaacttcaagctgttcaacatccaggtcaaggaagtcacgacgaacgaaggcaccaagaccatcgccaataatctcaccagcaccgtgcaggtctttacggactcggagtaccagttaccgtacgtgctaggatccgctcaccagggatgtctgcctccgttcccggcggacgtcttcatggttcctcagtacggctatttaactttaaacaatggaagccaagccctgggacgttcctccttctactgtctggagtatttcccatcgcagatgctgagaaccggcaacaactttcagttcagctacaccttcgaggacgtgcctttccacagcagctacgcgcacagccagagcctggacaggctgatgaatcccctcatcgaccagtacctgtactacctggtcagaacgcaaacgactggaactggagggacgcagactctggcattcagccaagcgggtcctagctcaatggccaaccaggctagaaattgggtgcccggaccttgctaccggcagcagcgcgtctccacgacaaccaaccagaacaacaacagcaactttgcctggacgggagctgccaagtttaagctgaacggccgagactctctaatgaatccgggcgtggcaatggcttcccacaaggatgacgacgaccgcttcttcccttcgagcggggtcctgatttttggcaagcaaggagccgggaacgatggagtggattacagccaagtgctgattacagatgaggaagaaatcaaggctaccaaccccgtggccacagaagaatatggagcagtggccatcaacaaccaggccgccaatacgcaggcgcagaccggactcgtgcacaaccagggggtgattcccggcatggtgtggcagaatagagacgtgtacctgcagggtcccatctgggccaaaattcctcacacggacggcaactttcacccgtctcccctgatgggcggctttggactgaagcacccgcctcctcaaattctcatcaagaacacaccggttccagcggacccgccgcttaccttcaaccaggccaagctgaactctttcatcacgcagtacagcaccggacaggtcagcgtggaaatcgagtgggagctgcagaaagaaaacagcaaacgctggaatccagagattcaatacacttccaactactacaaatctacaaatgtggactttgctgtcaacacggagggggtttatagcgagcctcgccccattggcacccgttacctcacccgcaacctgtaattacatgttaatcaataaaccggttaattcgtttcagttgaactttggtctctgcgaagggcgaattc

SEQ ID NO: 449 - protein, 736 aa, unidentified
  source 1..736: note = Adeno-associated virus
MAADGYLPDWLEDNLSEGIREWWDLKPGAPKPKANQQKQDDGRGLVLPGYKYLGPFNGLDKGEPVNAADAAALEHDKAYDQQLKAGDNPYLRYNHADAEFQERLQEDTSFGGNLGRAVFQAKKRVLEPLGLVEEGAKTAPGKKRPVEQSPQEPDSSSGIGKTGQQPAKKRLNFGQTGDSESVPDPQPLGEPPAAPSGLGPNTMASGGGAPMADNNEGADGVGNSSGNWHCDSTWLGDRVITTSTRTWALPTYNNHLYKQISNGTSGGSTNDNTYFGYSTPWGYFDFNRFHCHFSPRDWQRLINNNWGFRPKRLNFKLFNIQVKEVTTNEGTKTIANNLTSTVQVFTDSEYQLPYVLGSAHQGCLPPFPADVFMVPQYGYLTLNNGSQALGRSSFYCLEYFPSQMLRTGNNFQFSYTFEDVPFHSSYAHSQSLDRLMNPLIDQYLYYLVRTQTTGTGGTQTLAFSQAGPSSMANQARNWVPGPCYRQQRVSTTTNQNNNSNFAWTGAAKFKLNGRDSLMNPGVAMASHKDDDDRFFPSSGVLIFGKQGAGNDGVDYSQVLITDEEEIKATNPVATEEYGAVAINNQAANTQAQTGLVHNQGVIPGMVWQNRDVYLQGPIWAKIPHTDGNFHPSPLMGGFGLKHPPPQILIKNTPVPADPPLTFNQAKLNSFITQYSTGQVSVEIEWELQKENSKRWNPEIQYTSNYYKSTNVDFAVNTEGVYSEPRPIGTRYLTRNL

SEQ ID NO: 450 - DNA, 2370 bp, unidentified
  source 1..2370: mol_type = unassigned DNA; note = Adeno-associated virus
gaattcgccctttctacggctgcgtcaactggaccaatgagaactttcccttcaacgattgcgtcgacaagatggtgatctggtgggaggagggcaagatgacggccaaggtcgtggagtccgccaaggccattctcggcggcagcaaggtgcgcgtggaccaaaagtgcaagtcgtccgcccagatcgaccccacccccgtgatcgtcacctccaacaccaacatgtgcgccgtgattgacgggaacagcaccaccttcgagcaccagcagccgttgcaggaccggatgttcaagttcgaactcacccgccgtctggagcacgactttggcaaggtgaccaagcaggaagtcaaagagttcttccgctgggcgcaggatcacgtgaccgaggtggcgcatgagttctacgtcagaaagggcggagccagcaaaagacccgcccccgatgacgcggatataagcgagcccaagcgggcctgcccctcagtcgcggatccatcgacgtcagacgcggaaggagctccggtggactttgccgacaggtaccaaaacaaatgttctcgtcacgcgggcatgcttcagacgctgtttccctgcaaaacgtgcgagagaatgaatcagaatttcaacatttgcttcacgcacggggtcagagactgctcagaatgtttccccggtgcatcagaatctcaaccggtcgtcagaaaaaaaacgtatcagaaactgtgtgccattcatcatctgctggggcgggcacccgagattgcttgctcggcctgcgatctggtcaacgtggacctggacgactgtgtttctgagcaataaatgacttaaaccaggtatggctgccgatggttatcttccagattggcttgaggacaacctctctgagggcattcgcgagtggtgggacctgaaacctggagccccgaaacccaaagccaaccagcaaaagcaggacgacggccggggtctggtgcttcctggctacaagtacctcggacccttcaacggactcgacaagggggagcccgtcaacgcggcggacgcagcggccctcgagcacgacaaggcctacgaccagcagctcaaagcgggtgacaatccgtacctgcggtataaccacgccgacgccgagtttcaggagcgtctgcaagaagatacgtcttttgggggcaacctcgggcgagcagtcttccaggccaagaagcgggttctcgaacctctcggtctggttgaggaaggcgctaagacggctcctggaaagaagagaccggtagagccatcacctcagcgttcccccgactcctccacgggcatcggcaagaaaggccaccagcccgcgagaaagagactgaactttgggcagactggcgactcggagtcagtccccgaccctcaaccaatcggagaaccaccagcaggcccctctggtctgggatctggtacaatggctgcaggcggtggcgctccaatggcagacaataacgaaggcgccgacggagtgggtagttcctcaggaaattggcattgcgattccacatggctgggcgacagagtcatcaccaccagcacccgaacctgggccctgcccacctacaacaaccatctctacaagcaaatctccaacgggacatcgggaggaagcactaacgacaacacctactttggctacagcaccccctgggggtattttgacttcaacagattccactgccacttctcaccacgtgactggcagcgactcatcaacaataactggggattccggcccaagagactcaacttcaagctcttcaacatccaggtcaaggaggtcacgcagaatgaaggcaccaagaccatcgccaataaccttaccagcacgattcaggtgtttacggactcggaataccagctcccgtacgtcctcggctctgcgcaccagggctgcctccctccgttcccggcggacgtcttcatgattcctcagtacgggtatctgaccctaaacaatggcagtcaggctgtgggccgttcctccttctactgcctggaatacttcccttctcaaatgctgaggacgggcaacaactttgaattcagctacaccttcgaggacgtgcctttccacagcagctacgcgcacagccagagcctggaccggctgatgaaccctctcatcgaccagtacctgtattacttatccagaactcagtccacaggaggaactcaaggtactcagcaattgttattttctcaagccgggcccgcaaacatgtyggctcaggccaagaactggctacctggaccgtgttaccgtcagcaacgagtttccacgacactgtcgcaaaacaacaacagcaattttgctggaccggtgccacca

SEQ ID NO: 451 - protein, 738 aa, unidentified; identical to SEQ ID NO: 441
  source 1..738: note = Adeno-associated virus

SEQ ID NO: 452 - DNA, 2205 bp, unidentified
  source 1..2205: mol_type = unassigned DNA; note = Adeno-associated virus
atgactgacggttaccttccagattggctagaggacaacctctctgaaggcgttcgagagtggtgggcgctgcaacctggagcccctaaacccaaggcaaatcaacaacatcaggacaacgctcggggtcttgtgcttccgggttacaaatacctcggacccggcaacggactcgacaagggggaacccgtcaacgcagcggacgcggcagccctcgagcacgacaaggcctacgaccagcagctcaaggccggtgacaacccctacctcaagtacaaccacgccgacgcggagttccagcagcggcttcagggcgacacatcgtttgggggcaacctcggcagagcagtcttccaggccaaaaagagggttcttgaacctcttggtctggttgagcaagcgggtgagacggctcctggaaagaagagaccgttgattgaatccccccagcagcccgactcctccacgggtatcggcaaaaaaggcaagcagccggctaaaaagaagctcgttttcgaagacgaaactggagcaggcgacggaccccctgagggatcaacttccggagccatgtctgatgacagtgagatgcgtgcagcagctggcggagctgcagtcgagggcggacaaggtgccgatggagtgggtaatgcctcgggtgattggcattgcgattccacctggtctgagggccacgtcacgaccaccagcaccagaacctgggtcttgcccacctacaacaaccacctctacaagcgactcggagagagcctgcagtccaacacctacaacggattctccaccccctggggatactttgacttcaaccgcttccactgccacttctcaccacgtgactggcagcgactcatcaacaacaactggggcatgcgacccaaagccatgcgggtcaaaatcttcaacatccaggtcaaggaggtcacgacgtcgaacggcgagacaacggtggctaataaccttaccagcacggttcagatctttgcggactcgtcgtacgaactgccgtacgtgatggatgcgggtcaagagggcagcctgcctccttttcccaacgacgtctttatggtgccccagtacggctactgtggactggtgaccggcaacacttcgcagcaacagactgacagaaatgccttctactgcctggagtactttccttcgcagatgctgcggactggcaacaactttgaaattacgtacagttttgagaaggtgcctttccactcgatgtacgcgcacagccagagcctggaccggctgatgaaccctctcatcgaccagtacctgtggggactgcaatcgaccaccaccggaaccaccctgaatgccgggactgccaccaccaactttaccaagctgcggcctaccaacttttccaactttaaaaagaactggctgcccgggccttcaatcaagcagcagggcttctcaaagactgccaatcaaaactacaagatccctgccaccgggtcagacagtctcatcaaatacgagacgcacagcactctggacggaagatggagtgccctgacccccggacctccaatggccacggctggacctgcggacagcaagttcagcaacagccagctcatctttgcggggcctaaacagaacggcaacacggccaccgtacccgggactctgatcttcacctctgaggaggagctggcagccaccaacgccaccgatacggacatgtggggcaacctacctggcggtgaccagagcaacagcaacctgccgaccgtggacagactgacagccttgggagccgtgcctggaatggtctggcaaaacagagacatttactaccagggtcccatttgggccaagattcctcataccgatggacactttcacccctcaccgctgattggtgggtttgggctgaaacacccgcctcctcaaatttttatcaagaacaccccggtacctgcgaatcctgcaacgaccttcagctctactccggtaaactccttcattactcagtacagcactggccaggtgtcggtgcagattgactgggagatccagaaggagcggtccaaacgctggaaccccgaggtccagtttacctccaactacggacagcaaaactctctgttgtgggctcccgatgcggctgggaaatacactgagcctagggctatcggtacccgctacctcacccaccacctgtaa

SEQ ID NO: 453 - protein, 734 aa, unidentified; identical to SEQ ID NO: 425
  source 1..734: note = Adeno-associated virus

SEQ ID NO: 454 - DNA, 3128 bp, unidentified
  source 1..3128: mol_type = unassigned DNA; note = Adeno-associated virus
gaattcgccctttctacggctgcgtcaactggaccaatgagaactttcccttcaacgattgcgtcgacaagatgttgatctggtgggaggagggcaagatgacggccaaggtcgtggagtccgccaaggccattctcggcggcagcaaagtgcgcgtggaccaaaagtgcaagccgtccgcccagatcgaccccacccccgtgatcgtcacctccaacaccaacatgtgcgccgtgattgacgggaacagcaccaccttcgagcaccagcagccgttgcgggaccggatgttcaagtttgaactcacccgccgtctggagcacgactttggcaaggtgacaaagcaggaagtcagagagttcttccgctgggcgcaggatcacgtgaccgaggtggcgcacgagttctacgtcagaaagggtggagccaacaagagacccgcccccgatgacgcggataaaagcgagcccaagcgggcctgcccctcagtcgcggatccatcgacgtcagacgcggaaggagctccggtggactttgccgacaggtaccaaaacaaatgttctcgtcacgcgggcatgcttcagatgctgtttccctgcaaaacatgcgagagaatgaatcagaatttcaacatttgcttcacgcacgggaccagagactgttcagaatgtttccccggcgtgtcagaatctcaaccggtcgtcagaaaaaagacgtatcggaaactctgtgcgattcatcatctgctggggcgggcacccgagattgcttgctcggcctgcgatctggtcaacgtggacctagatgactgtgtttctgagcaataaatgacttaaaccaggtatggctgccgatggttatcttccagattggctcgaggacaacctctctgagggcattcgcgagtggtgggacttgaaacctggagccccgaaacccaaagccaaccagcaaaagcaggacgacggccggggtctggtgcttcctggctacaagtacctcggacccttcaacggactcgacaagggggagcccgtcaacgcggcggacgcagcggccctcgagcacgacaaggcctacgaccagcagctcaaagcgggtgacaatccgtacctgcggtataaccacgccgacgccgagtttcaggagcgtctgcaagaagatacgtcttttgggggcaacctcgggcgagcagtcttccaggccaagaagcgggttctcgaacctctcggtctggttgaggaaggcgctaagacggctcctggaaagaagagaccggtagagccatcaccccagcgttctccagactcctctacgggcatcggcaagaaaggccagcagcccgcgaaaaagagactcaactttgggcagactggcgactcagagtcagtgcccgaccctcaaccaatcggagaaccccccgcaggcccctctggtctgggatctggtacaatggctgcaggcggtggcgctccaatggcagacaataacgaaggcgccgacggagtgggtagttcctcaggaaattggcattgcgattccacatggctgggcgacagagtcatcaccaccagcacccgaacctgggccctccccacctacaacaaccacctctacaagcaaatctccaacgggacttcgggaggaagcaccaacgacaacacctacttcggctacagcaccccctgggggtattttgactttaacagattccactgccacttctcaccacgtgactggcagcgactcatcaacaacaactggggattccggcccaagagactcaacttcaagctcttcaacatccaggtcaaggaggtcacgcagaatgaaggcaccaagaccatcgccaataaccttaccagcacgattcaggtctttacggactcggaataccagctcccgtacgtcctcggctctgcgcaccagggctgcctgcctccgttcccggcggacgtcttcatgattcctcagtacgggtacctgactctgaacaatggcagtcaggccgtgggccgttcctccttctactgcctggagtactttccttctcaaatgctgagaacgggcaacaactttgagttcagctaccagtttgaggacgtgccttttcacagcagctacgcgcacagccaaagcctggaccggctgatgaaccccctcatcgaccagtacctgtactacctgtctcggactcagtccacgggaggtaccgcaggaactcagcagttgctattttctcaggccgggcctaataacatgtcggctcaggccaaaaactggctacccgggccctgctaccggcagcaacgcgtctccacgacactgtcgcaaaataacaacagcaactgtaaatcccggtgtcgctatggcaacccacaaggacgacgaagagcgattttgcctggaccggtgccaccaagtatcatctgaatggcagagactctctgttttccgtccagcggagtcttaatgtttgggaaacagggagctggaaaagacaacgtggactatagcagcgttatgctaaccagtgaggaagaaattaaaaccaccaacccagtggccacggaacagtacggcgtggtggccgataacctgcaacagcaaaacgccgctcctattgtaggggccgtcaacagtcaaggagccttacctggcatggtctggcagaaccgggacgtgtacctgcagggtcctatctgggccaagattcctcacacggacggaaactttcatccctcgccgctgatgggaggctttggactgaaacacccgcctcctcagatcctgattaagaatacacctgttcccgcggatcctccaactaccttcagtcaagctaagctggcgtcgttcatcacgcagtacagcaccggacaggtcagcgtggaaattgaatgggagctgcagaaagaaaacagcaaacgctggaacccagagattcaatacacttccaactactacaaatctacaaatgtggacttcgctgttaacacagatggcacttattctgagcctcgccccattggcacccgttacctcacccgtaatctgtaattgctcgttaatcaataaaccggttgattcgtttcagttgaactttggtctctgcgaagggcgaattc

SEQ ID NO: 455 - protein, 738 aa, unidentified; identical to SEQ ID NO: 375
  source 1..738: note = Adeno-associated virus

SEQ ID NO: 456 - DNA, 3128 bp, unidentified
  source 1..3128: mol_type = unassigned DNA; note = Adeno-associated virus
gaattcgccctttctacggctgcgtcaactggaccaatgagaactttcccttcaacgattgcgtcgacaagatggtgatctggtgggaggagggcaagatgacggccaaggtcgtggagtccgccaaggccattctcggcggcagcaaagtgcgcgtggaccaaaagtgcaagtcgtccgcccagatcgaccccacccccgtgatcgtcacctccaacaccaacatgtgcgccgtgattgacgggaacagcaccaccttcgagcaccagcagccgttgcaggaccggatgttcaagtttgaactcacccgccgtctggagcacgactttggcaaggtgacaaagcaggaagtcagagagttcttccgctgggcgcaggatcacgtgaccgaggtggcgcacgagttctacgtcagaaagggtggagccaacaagagacccgcccccgatgacgcggataaaagcgagcccaagcgggcctgcccctcagtcgcggatccatcgacgtcagacgcggaaggagctccggtggactttgccgacaggtaccaaaacaaatgttctcgtcacgcgggcatgcttcagatgctgtttccctgcaaaacatgcgagagaatgaatcagaatttcaacatttgcttcacgcacgggaccagagactgttcagaatgtttccccggcgtgtcagaatctcaaccggttgtcagaaaaaagacgtatcggaaactctgtgcgattcatcatctgctggggcgggcacccgagattgcttgctcggcctgcgatctggtcaacgtggacctagatgactgtgtttctgagcaataaatgacttaaaccaggtatggctgccgatggttatcttccagattggctcgaggacaacctctctgagggcattcgcgagtggtgggacttgaaacctggagccccgaaacccaaagccaaccagcaaaagcaggacgacggccggggtctggtgcttcctggctacaagtacctcggacccttcaacggactcgacaagggggagcccgtcaacgcggcggacgcagcggccctcgagcacgacaaggcctacgaccagcagctcaaagcgggtgacaatccgtacctgcggtataaccacgccgacgccgagtttcaggagcgtctgcaagaagatacgtcttttgggggcaacctcgggcgagcagtcttccaggccaagaagcgggttctcgaacctctcggtctggttgaggaaggcgctaagacggctcctggaaagaagagaccggtagagccatcaccccagcgttctccagactcctctacgggcatcggcaagaaaggccagcagcccgcgaaaaagagactcaactttgggcagactggcgactcagagtcagtgcccgaccctcaaccaatcggagaaccccccgcaggcccctctggtctgggatctggtacaatggctgcaggcggtggcgctccaatggcagacaataacgaaggcgccgacggagtgggtagttcctcaggaaattggcattgcgattccacatggctgggcgacagagtcatcaccaccagcacccgaacctgggccctccccacctacaacaaccacctctacaagcaaatctccaacgggacttcgggaggaagcaccaacgacaacacctacttcggctacagcaccccctgggggtattttgactttaacagattccactgccacttctcaccacgtgactggcagcgactcatcaacaacaactggggattccggcccaagagacccaacttcaagctcttcaacatccaggtcaaggaggtcacgcagaatgaaggcaccaagaccatcgccaataaccttaccagcacgattcaggtctttacggactcggaataccagctcccgtacgtcctcggctctgcgcaccagggctgcctgcctccgttcccggcggacgtcttcatgattcctcagtacgggtacctgactctgaacaatggcagtcaggccgtgggccgttcctccttctactgcctggagtactttccttctcaaatgctgagaacgggcaacaactttgagttcagctaccagtttgaggacgtgccttttcacagcagctacgcgcacagccaaagcctggaccggctgatgaaccccctcatcgaccagtacctgtactacctgtctcggactcagtccacgggaggtaccgcaggaactcagcagttgctattttctcaggccgggcctaataacatgtcggctcaggccaaaaactggctacccgggccctgctaccggcagcaacgcgtctccacgacactgtcgcaaaataacaacagcaactttgcctggaccggtgccaccaagtatcatctgaatggcagagactctctggtaaatcccggtgtcgctatggcaacccacaaggacgacgaagagcgattttttccgtccagcggagtcttaatgtttgggaaacagggagctggaaaagacaacgtggactatagcagcgttatgctaaccagtgaggaagaaattaaaaccaccaacccagtggccacagaacagtacggcgtggtggccgataacctgcaacagcaaaacgccgctcctattgtaggggccgtcaacagtcaaggagccttacctggcatggtctggcagaaccgggacgtgtacctgcagggtcctatctgggccaagattcctcacacggacggaaactttcatccctcgccgctgatgggaggctttggactgaaacacccgcctcctcagatcctgattaagaatacacctgttcccgcggatcctccaactaccttcagtcaagctaagctggcgtcgttcatcacgcagtacagcaccggacaggtcagcgtggaaattgaatgggagctgcagaaagaaaacagcaaacgctggaacccagagattcaatacacttccaactactacaaatctacaaatgtggactttgctgttaacacagatggcacttattctgagcctcgccccattggcacccgttacctcacccgtaatctgtaattgcttgttaatcaataaaccggttgattcgtttcagttgaactttggtctctgcgaagggcgaattc

SEQ ID NO: 457 - protein, 738 aa, unidentified
  source 1..738: note = Adeno-associated virus
MAADGYLPDWLEDNLSEGIREWWDLKPGAPKPKANQQKQDDGRGLVLPGYKYLGPFNGLDKGEPVNAADAAALEHDKAYDQQLKAGDNPYLRYNHADAEFQERLQEDTSFGGNLGRAVFQAKKRVLEPLGLVEEGAKTAPGKKRPVEPSPQRSPDSSTGIGKKGQQPAKKRLNFGQTGDSESVPDPQPIGEPPAGPSGLGSGTMAAGGGAPMADNNEGADGVGSSSGNWHCDSTWLGDRVITTSTRTWALPTYNNHLYKQISNGTSGGSTNDNTYFGYSTPWGYFDFNRFHCHFSPRDWQRLINNNWGFRPKRPNFKLFNIQVKEVTQNEGTKTIANNLTSTIQVFTDSEYQLPYVLGSAHQGCLPPFPADVFMIPQYGYLTLNNGSQAVGRSSFYCLEYFPSQMLRTGNNFEFSYQFEDVPFHSSYAHSQSLDRLMNPLIDQYLYYLSRTQSTGGTAGTQQLLFSQAGPNNMSAQAKNWLPGPCYRQQRVSTTLSQNNNSNFAWTGATKYHLNGRDSLVNPGVAMATHKDDEERFFPSSGVLMFGKQGAGKDNVDYSSVMLTSEEEIKTTNPVATEQYGVVADNLQQQNAAPIVGAVNSQGALPGMVWQNRDVYLQGPIWAKIPHTDGNFHPSPLMGGFGLKHPPPQILIKNTPVPADPPTTFSQAKLASFITQYSTGQVSVEIEWELQKENSKRWNPEIQYTSNYYKSTNVDFAVNTDGTYSEPRPIGTRYLTRNL

SEQ ID NO: 458 - protein, 738 aa, unidentified
  source 1..738: note = Adeno-associated virus
MAADGYLPDWLEDNLSEGIREWWDLKPGAPKPKANQQKQDDGRGLVLPGYKYLGPFNGLDKGEPVNAADAAALEHDKAYDQQLKAGDNPYLRYNHADAEFQERLQEDTSFGGNLGRAVFQAKKRVLEPLGLVEEAAKTAPGKKRPVEPSPQRSPDSSTGIGKKGQQPAKKRLNFGQTGDSESVPDPQPIGEPPAGPSGLGSGTMAAGGGAPMADNNEGADGVGSSSGNWHCDSTWLGDRVITTSTRTWALPTYNNHLYKQISNGTSGGSTNDNTYFGYSTPWGYFDFNRFHCHFSPRDWQRLINNNWGFRPKRLSFKLFNIQVKEVTQNEGTKTIANNLTSTIQVFTDSEYQLPYVLGSAHQGCLPPFPADVFMIPQYGYLTLNNGSQAVGRSSFYCLEYFPSQMLRTGNNFEFSYTFEDVPFHSSYAHSQSLDRLMNPLIDQYLYYLSRTQSTGGTQGTQQLLFSQAGPANMSAQAKNWLPGPCYRQQRVSTTLSQNNNSNFAWTGATKYHLNGRDSLVNPGVAMATHKDDEERFFPSSGVLMFGKQGAGRDNVDYSSVMLTSEEEIKTTNPVATEQYGVVADNLQQTNTGPIVGNVNSQGALPGMVWQNRDVYLQGPIWAKIPHTDGNFHPSPLMGGFGLKHPPPQILIKNTPVPADPPTTFSQAKLASFITQYSTGQVSVEIEWELQKENSKRWNPEIQYTSNYYKSTNVDFAVNTEGTYSEPRPIGTRYLTRNL

SEQ ID NO: 459 - DNA, 2172 bp, synthetic construct
  source 1..2172: mol_type = other DNA; note = Description of Artificial Sequence: Synthetic polynucleotide
atgtcttttgttgatcaccctccagattggttggaagaagttggtgaaggtcttcgcgagtttttgggccttgaagcgggcccaccgaaaccaaaacccaatcagcagcatcaagatcaagcccgtggtcttgtgctgcctggttataactatctcggacccggaaacggtctcgatcgaggagagcctgtcaacagggcagacgaggtcgcgcgagagcacgacatctcgtacaacgagcagcttgaggcgggagacaacccctacctcaagtacaaccacgcggacgccgagtttcaggagaagctcgccgacgacacatccttcgggggaaacctcggaaaggcagtctttcaggccaagaaaagggttctcgaaccttttggcctggttgaagagggtgctaagacggcccctaccggaaagcggatagacgaccactttccaaaaagaaagaaggctcggaccgaagaggactccaagccttccacctcgtcagacgccgaagctggacccagcggatcccagcagctgcaaatcccagcccaaccagcctcaagtttgggagctgatacaatgtctgcgggaggtggcggcccattgggcgacaataaccaaggtgccgatggagtgggcaatgcctcgggagattggcattgcgattccacgtggatgggggacagagtcgtcaccaagtccacccgaacctgggtgctgcccagctacaacaaccaccagtaccgagagatcaaaagcggctccgtcgacggaagcaacgccaacgcctactttggatacagcaccccctgggggtactttgactttaaccgcttccacagccactggagcccccgagactggcaaagactcatcaacaactactggggcttcagaccccggtccctcagagtcaaaatcttcaacattcaagtcaaagaggtcacggtgcaggactccaccaccaccatcgccaacaacctcacctccaccgtccaagtgtttacggacgacgactaccagctgccctacgtcgtcggcaacgggaccgagggatgcctgccggccttccctccgcaggtctttacgctgccgcagtacggttacgcgacgctgaaccgcgacaacacagaaaatcccaccgagaggagcagcttcttctgcctagagtactttcccagcaagatgctgagaacgggcaacaactttgagtttacctacaactttgaggaggtgcccttccactccagcttcgctcccagtcagaacctgttcaagctggccaacccgctggtggaccagtacttgtaccgcttcgtgagcacaaataacactggcggagtccagttcaacaagaacctggccgggagatacgccaacacctacaaaaactggttcccggggcccatgggccgaacccagggctggaacctgggctccggggtcaaccgcgccagtgtcagcgccttcgccacgaccaataggatggagctcgagggcgcgagttaccaggtgcccccgcagccgaacggcatgaccaacaacctccagggcagcaacacctatgccctggagaacactatgatcttcaacagccagccggcgaacccgggcaccaccgccacgtacctcgagggcaacatgctcatcaccagcgagagcgagacgcagccggtgaaccgcgtggcgtacaacgtcggcgggcagatggccaccaacaaccagagctccaccactgcccccgcgaccggcacgtacaacctccaggaaatcgtgcccggcagcgtgtggatggagagggacgtgtacctccaaggacccatctgggccaagatcccagagacgggggcgcactttcacccctctccggccatgggcggattcggactcaaacacccaccgcccatgatgctcatcaagaacacgcctgtgcccggaaatatcaccagcttctcggacgtgcccgtcagcagcttcatcacccagtacagcaccgggcaggtcaccgtggagatggagtgggagctcaagaaggaaaactccaagaggtggaacccagagatccagtacacaaacaactacaacgacccccagtttgtggactttgccccggacagcaccggggaatacagaaccaccagacctatcggaacccgataccttacccgacccctt

SEQ ID NO: 460 - protein, 720 aa, unidentified
  source 1..720: note = Adeno-associated virus
MSFVDHPPDWLEEVGEGLREFLGLEAGPPKPKPNQQHQDQARGLVLPGYNYLGPGNGLDRGEPVNRADEVAREHDISYNEQLEAGDNPYLKYNHADAEFQEKLADDTSFGGNLGKAVFQAKKRVLEPFGLVEEGAKTAPTGKRIDDHFPKRKKARTEEDSKPSTSSDAEAGPSGSQQLQIPAQPASSLGADTMSAGGGGPLGDNNQGADGVGNASGDWHCDSTWMGDRVVTKSTRTWVLPSYNNHQYREIKSGSVDGSNANAYFGYSTPWGYFDFNRFHSHWSPRDWQRLINNYWGFRPRSLRVKIFNIQVKEVTVQDSTTTIANNLTSTVQVFTDDDYQLPYVVGNGTEGCLPAFPPQVFTLPQYGYATLNRDNTENPTERSSFFCLEYFPSKMLRTGNNFEFTYNFEEVPFHSSFAPSQNLFKLANPLVDQYLYRFVSTNNTGGVQFNKNLAGRYANTYKNWFPGPMGRTQGWNLGSGVNRASVSAFATTNRMELEGASYQVPPQPNGMTNNLQGSNTYALENTMIFNSQPANPGTTATYLEGNMLITSESETQPVNRVAYNVGGQMATNNQSSTTAPATGTYNLQEIVPGSVWMERDVYLQGPIWAKIPETGAHFHPSPAMGGFGLKHPPPMMLIKNTPVPGNITSFSDVPVSSFITQYSTGQVTVEMEWELKKENSKRWNPEIQYTNNYNDPQFVDFAPDSTGEYRTTRPIGTRYL

SEQ ID NO: 461 - protein, 724 aa, unidentified
  source 1..724: note = Adeno-associated virus 5
MSFVDHPPDWLEEVGEGLREFLGLEAGPPKPKPNQQHQDQARGLVLPGYNYLGPGNGLDRGEPVNRADEVAREHDISYNEQLEAGDNPYLKYNHADAEFQEKLADDTSFGGNLGKAVFQAKKRVLEPFGLVEEGAKTAPTGKRIDDHFPKRKKARTEEDSKPSTSSDAEAGPSGSQQLQIPAQPASSLGADTMSAGGGGPLGDNNQGADGVGNASGDWHCDSTWMGDRVVTKSTRTWVLPSYNNHQYREIKSGSVDGSNANAYFGYSTPWGYFDFNRFHSHWSPRDWQRLINNYWGFRPRSLRVKIFNIQVKEVTVQDSTTTIANNLTSTVQVFTDDDYQLPYVVGNGTEGCLPAFPPQVFTLPQYGYATLNRDNTENPTERSSFFCLEYFPSKMLRTGNNFEFTYNFEEVPFHSSFAPSQNLFKLANPLVDQYLYRFVSTNNTGGVQFNKNLAGRYANTYKNWFPGPMGRTQGWNLGSGVNRASVSAFATTNRMELEGASYQVPPQPNGMTNNLQGSNTYALENTMIFNSQPANPGTTATYLEGNMLITSESETQPVNRVAYNVGGQMATNNQSSTTAPATGTYNLQEIVPGSVWMERDVYLQGPIWAKIPETGAHFHPSPAMGGFGLKHPPPMMLIKNTPVPGNITSFSDVPVSSFITQYSTGQVTVEMEWELKKENSKRWNPEIQYTNNYNDPQFVDFAPDSTGEYRTTRPIGTRYLTRPL

SEQ ID NO: 462 - protein, 2175 aa, unidentified
  source 1..2175: note = Adeno-associated virus 5
ATGTCTTTTGTTGATCACCCTCCAGATTGGTTGGAAGAAGTTGGTGAAGGTCTTCGCGAGTTTTTGGGCCTTGAAGCGGGCCCACCGAAACCAAAACCCAATCAGCAGCATCAAGATCAAGCCCGTGGTCTTGTGCTGCCTGGTTATAACTATCTCGGACCCGGAAACGGTCTCGATCGAGGAGAGCCTGTCAACAGGGCAGACGAGGTCGCGCGAGAGCACGACATCTCGTACAACGAGCAGCTTGAGGCGGGAGACAACCCCTACCTCAAGTACAACCACGCGGACGCCGAGTTTCAGGAGAAGCTCGCCGACGACACATCCTTCGGGGGAAACCTCGGAAAGGCAGTCTTTCAGGCCAAGAAAAGGGTTCTCGAACCTTTTGGCCTGGTTGAAGAGGGTGCTAAGACGGCCCCTACCGGAAAGCGGATAGACGACCACTTTCCAAAAAGAAAGAAGGCTCGGACCGAAGAGGACTCCAAGCCTTCCACCTCGTCAGACGCCGAAGCTGGACCCAGCGGATCCCAGCAGCTGCAAATCCCAGCCCAACCAGCCTCAAGTTTGGGAGCTGATACAATGTCTGCGGGAGGTGGCGGCCCATTGGGCGACAATAACCAAGGTGCCGATGGAGTGGGCAATGCCTCGGGAGATTGGCATTGCGATTCCACGTGGATGGGGGACAGAGTCGTCACCAAGTCCACCCGAACCTGGGTGCTGCCCAGCTACAACAACCACCAGTACCGAGAGATCAAAAGCGGCTCCGTCGACGGAAGCAACGCCAACGCCTACTTTGGATACAGCACCCCCTGGGGGTACTTTGACTTTAACCGCTTCCACAGCCACTGGAGCCCCCGAGACTGGCAAAGACTCATCAACAACTACTGGGGCTTCAGACCCCGGTCCCTCAGAGTCAAAATCTTCAACATTCAAGTCAAAGAGGTCACGGTGCAGGACTCCACCACCACCATCGCCAACAACCTCACCTCCACCGTCCAAGTGTTTACGGACGACGACTACCAGCTGCCCTACGTCGTCGGCAACGGGACCGAGGGATGCCTGCCGGCCTTCCCTCCGCAGGTCTTTACGCTGCCGCAGTACGGTTACGCGACGCTGAACCGCGACAACACAGAAAATCCCACCGAGAGGAGCAGCTTCTTCTGCCTAGAGTACTTTCCCAGCAAGATGCTGAGAACGGGCAACAACTTTGAGTTTACCTACAACTTTGAGGAGGTGCCCTTCCACTCCAGCTTCGCTCCCAGTCAGAACCTGTTCAAGCTGGCCAACCCGCTGGTGGACCAGTACTTGTACCGCTTCGTGAGCACAAATAACACTGGCGGAGTCCAGTTCAACAAGAACCTGGCCGGGAGATACGCCAACACCTACAAAAACTGGTTCCCGGGGCCCATGGGCCGAACCCAGGGCTGGAACCTGGGCTCCGGGGTCAACCGCGCCAGTGTCAGCGCCTTCGCCACGACCAATAGGATGGAGCTCGAGGGCGCGAGTTACCAGGTGCCCCCGCAGCCGAACGGCATGACCAACAACCTCCAGGGCAGCAACACCTATGCCCTGGAGAACACTATGATCTTCAACAGCCAGCCGGCGAACCCGGGCACCACCGCCACGTACCTCGAGGGCAACATGCTCATCACCAGCGAGAGCGAGACGCAGCCGGTGAACCGCGTGGCGTACAACGTCGGCGGGCAGATGGCCACCAACAACCAGAGCTCCACCACTGCCCCCGCGACCGGCACGTACAACCTCCAGGAAATCGTGCCCGGCAGCGTGTGGATGGAGAGGGACGTGTACCTCCAAGGACCCATCTGGGCCAAGATCCCAGAGACGGGGGCGCACTTTCACCCCTCTCCGGCCATGGGCGGATTCGGACTCAAACACCCACCGCCCATGATGCTCATCAAGAACACGCCTGTGCCCGGAAATATCACCAGCTTCTCGGACGTGCCCGTCAGCAGCTTCATCACCCAGTACAGCACCGGGCAGGTCACCGTGGAGATGGAGTGGGAGCTCAAGAAGGAAAACTCCAAGAGGTGGAACCCAGAGATCCAGTACACAAACAACTACAACGACCCCCAGTTTGTGGACTTTGCCCCGGACAGCACCGGGGAATACAGAACCACCAGACCTATCGGAACCCGATACCTTACCCGACCCCTTTAA

SEQ ID NO: 463 - DNA, 2208 bp, unidentified
  source 1..2208: mol_type = unassigned DNA; note = Adeno-associated virus 6
atggctgccgatggttatcttccagattggctcgaggacaacctctctgagggcattcgcgagtggtgggacttgaaacctggagccccgaaacccaaagccaaccagcaaaagcaggacgacggccggggtctggtgcttcctggctacaagtacctcggacccttcaacggactcgacaagggggagcccgtcaacgcggcggatgcagcggccctcgagcacgacaaggcctacgaccagcagctcaaagcgggtgacaatccgtacctgcggtataaccacgccgacgccgagtttcaggagcgtctgcaagaagatacgtcttttgggggcaacctcgggcgagcagtcttccaggccaagaagagggttctcgaaccttttggtctggttgaggaaggtgctaagacggctcctggaaagaaacgtccggtagagcagtcgccacaagagccagactcctcctcgggcattggcaagacaggccagcagcccgctaaaaagagactcaattttggtcagactggcgactcagagtcagtccccgacccacaacctctcggagaacctccagcaacccccgctgctgtgggacctactacaatggcttcaggcggtggcgcaccaatggcagacaataacgaaggcgccgacggagtgggtaatgcctcaggaaattggcattgcgattccacatggctgggcgacagagtcatcaccaccagcacccgaacatgggccttgcccacctataacaaccacctctacaagcaaatctccagtgcttcaacgggggccagcaacgacaaccactacttcggctacagcaccccctgggggtattttgatttcaacagattccactgccatttctcaccacgtgactggcagcgactcatcaacaacaattggggattccggcccaagagactcaacttcaagctcttcaacatccaagtcaaggaggtcacgacgaatgatggcgtcacgaccatcgctaataaccttaccagcacggttcaagtcttctcggactcggagtaccagttgccgtacgtcctcggctctgcgcaccagggctgcctccctccgttcccggcggacgtgttcatgattccgcagtacggctacctaacgctcaacaatggcagccaggcagtgggacggtcatccttttactgcctggaatatttcccatcgcagatgctgagaacgggcaataactttaccttcagctacaccttcgaggacgtgcctttccacagcagctacgcgcacagccagagcctggaccggctgatgaatcctctcatcgaccagtacctgtattacctgaacagaactcagaatcagtccggaagtgcccaaaacaaggacttgctgtttagccgggggtctccagctggcatgtctgttcagcccaaaaactggctacctggaccctgttaccggcagcagcgcgtttctaaaacaaaaacagacaacaacaacagcaactttacctggactggtgcttcaaaatataaccttaatgggcgtgaatctataatcaaccctggcactgctatggcctcacacaaagacgacaaagacaagttctttcccatgagcggtgtcatgatttttggaaaggagagcgccggagcttcaaacactgcattggacaatgtcatgatcacagacgaagaggaaatcaaagccactaaccccgtggccaccgaaagatttgggactgtggcagtcaatctccagagcagcagcacagaccctgcgaccggagatgtgcatgttatgggagccttacctggaatggtgtggcaagacagagacgtatacctgcagggtcctatttgggccaaaattcctcacacggatggacactttcacccgtctcctctcatgggcggctttggacttaagcacccgcctcctcagatcctcatcaaaaacacgcctgttcctgcgaatcctccggcagagttttcggctacaaagtttgcttcattcatcacccagtattccacaggacaagtgagcgtggagattgaatgggagctgcagaaagaaaacagcaaacgctggaatcccgaagtgcagtatacatctaactatgcaaaatctgccaacgttgatttcactgtggacaacaatggactttatactgagcctcgccccattggcacccgttacctcacccgtcccctg

SEQ ID NO: 464 - protein, 736 aa, unidentified
  source 1..736: note = Adeno-associated virus 6
MAADGYLPDWLEDNLSEGIREWWDLKPGAPKPKANQQKQDDGRGLVLPGYKYLGPFNGLDKGEPVNAADAAALEHDKAYDQQLKAGDNPYLRYNHADAEFQERLQEDTSFGGNLGRAVFQAKKRVLEPFGLVEEGAKTAPGKKRPVEQSPQEPDSSSGIGKTGQQPAKKRLNFGQTGDSESVPDPQPLGEPPATPAAVGPTTMASGGGAPMADNNEGADGVGNASGNWHCDSTWLGDRVITTSTRTWALPTYNNHLYKQISSASTGASNDNHYFGYSTPWGYFDFNRFHCHFSPRDWQRLINNNWGFRPKRLNFKLFNIQVKEVTTNDGVTTIANNLTSTVQVFSDSEYQLPYVLGSAHQGCLPPFPADVFMIPQYGYLTLNNGSQAVGRSSFYCLEYFPSQMLRTGNNFTFSYTFEDVPFHSSYAHSQSLDRLMNPLIDQYLYYLNRTQNQSGSAQNKDLLFSRGSPAGMSVQPKNWLPGPCYRQQRVSKTKTDNNNSNFTWTGASKYNLNGRESIINPGTAMASHKDDKDKFFPMSGVMIFGKESAGASNTALDNVMITDEEEIKATNPVATERFGTVAVNLQSSSTDPATGDVHVMGALPGMVWQDRDVYLQGPIWAKIPHTDGHFHPSPLMGGFGLKHPPPQILIKNTPVPANPPAEFSATKFASFITQYSTGQVSVEIEWELQKENSKRWNPEVQYTSNYAKSANVDFTVDNNGLYTEPRPIGTRYLTRPL

SEQ ID NO: 465 - protein, 623 aa, unidentified
  source 1..623: note = Adeno-associated virus 6
MPGFYEIVIKVPSDLDEHLPGISDSFVNWVAEKEWELPPDSDMDLNLIEQAPLTVAEKLQRDFLVQWRRVSKAPEALFFVQFEKGESYFHLHILVETTGVKSMVLGRFLSQIRDKLVQTIYRGIEPTLPNWFAVTKTRNGAGGGNKVVDECYIPNYLLPKTQPELQWAWTNMEEYISACLNLAERKRLVAHDLTHVSQTQEQNKENLNPNSDAPVIRSKTSARYMELVGWLVDRGITSEKQWIQEDQASYISFNAASNSRSQIKAALDNAGKIMALTKSAPDYLVGPAPPADIKTNRIYRILELNGYDPAYAGSVFLGWAQKRFGKRNTIWLFGPATTGKTNIAEAIAHAVPFYGCVNWTNENFPFNDCVDKMVIWWEEGKMTAKVVESAKAILGGSKVRVDQKCKSSAQIDPTPVIVTSNTNMCAVIDGNSTTFEHQQPLQDRMFKFELTRRLEHDFGKVTKQEVKEFFRWAQDHVTEVAHEFYVRKGGANKRPAPDDADKSEPKRACPSVADPSTSDAEGAPVDFADRYQNKCSRHAGMLQMLFPCKTCERMNQNFNICFTHGTRDCSECFPGVSESQPVVRKRTYRKLCAIHHLLGRAPEIACSACDLVNVDLDDCVSEQ

SEQ ID NO: 466 - DNA, 4683 bp, unidentified
  source 1..4683: mol_type = unassigned DNA; note = Adeno-associated virus 6
ttggccactccctctctgcgcgctcgctcgctcactgaggccgggcgaccaaaggtcgcccgacgcccgggctttgcccgggcggcctcagtgagcgagcgagcgcgcagagagggagtggccaactccatcactaggggttcctggaggggtggagtcgtgacgtgaattacgtcatagggttagggaggtcctgtattagaggtcacgtgagtgttttgcgacattttgcgacaccatgtggtcacgctgggtatttaagcccgagtgagcacgcagggtctccattttgaagcgggaggtttgaacgcgcagcgccatgccggggttttacgagattgtgattaaggtccccagcgaccttgacgagcatctgcccggcatttctgacagctttgtgaactgggtggccgagaaggaatgggagttgccgccagattctgacatggatctgaatctgattgagcaggcacccctgaccgtggccgagaagctgcagcgcgacttcctggtccagtggcgccgcgtgagtaaggccccggaggccctcttctttgttcagttcgagaagggcgagtcctacttccacctccatattctggtggagaccacgggggtcaaatccatggtgctgggccgcttcctgagtcagattagggacaagctggtgcagaccatctaccgcgggatcgagccgaccctgcccaactggttcgcggtgaccaagacgcgtaatggcgccggaggggggaacaaggtggtggacgagtgctacatccccaactacctcctgcccaagactcagcccgagctgcagtgggcgtggactaacatggaggagtatataagcgcgtgtttaaacctggccgagcgcaaacggctcgtggcgcacgacctgacccacgtcagccagacccaggagcagaacaaggagaatctgaaccccaattctgacgcgcctgtcatccggtcaaaaacctccgcacgctacatggagctggtcgggtggctggtggaccggggcatcacctccgagaagcagtggatccaggaggaccaggcctcgtacatctccttcaacgccgcctccaactcgcggtcccagatcaaggccgctctggacaatgccggcaagatcatggcgctgaccaaatccgcgcccgactacctggtaggccccgctccgcccgccgacattaaaaccaaccgcatttaccgcatcctggagctgaacggctacgaccctgcctacgccggctccgtctttctcggctgggcccagaaaaggttcggaaaacgcaacaccatctggctgtttgggccggccaccacgggcaagaccaacatcgcggaagccatcgcccacgccgtgcccttctacggctgcgtcaactggaccaatgagaactttcccttcaacgattgcgtcgacaagatggtgatctggtgggaggagggcaagatgacggccaaggtcgtggagtccgccaaggccattctcggcggcagcaaggtgcgcgtggaccaaaagtgcaagtcgtccgcccagatcgatcccacccccgtgatcgtcacctccaacaccaacatgtgcgccgtgattgacgggaacagcaccaccttcgagcaccagcagccgttgcaggaccggatgttcaaatttgaactcacccgccgtctggagcatgactttggcaaggtgacaaagcaggaagtcaaagagttcttccgctgggcgcaggatcacgtgaccgaggtggcgcatgagttctacgtcagaaagggtggagccaacaagagacccgcccccgatgacgcggataaaagcgagcccaagcgggcctgcccctcagtcgcggatccatcgacgtcagacgcggaaggagctccggtggactttgccgacaggtaccaaaacaaatgttctcgtcacgcgggcatgcttcagatgctgtttccctgcaaaacatgcgagagaatgaatcagaatttcaacatttgcttcacgcacgggaccagagactgttcagaatgtttccccggcgtgtcagaatctcaaccggtcgtcagaaagaggacgtatcggaaactctgtgccattcatcatctgctggggcgggctcccgagattgcttgctcggcctgcgatctggtcaacgtggatctggatgactgtgtttctgagcaataaatgacttaaaccaggtatggctgccgatggttatcttccagattggctcgaggacaacctctctgagggcattcgcgagtggtgggacttgaaacctggagccccgaaacccaaagccaaccagcaaaagcaggacgacggccggggtctggtgcttcctggctacaagtacctcggacccttcaacggactcgacaagggggagcccgtcaacgcggcggatgcagcggccctcgagcacgacaaggcctacgaccagcagctcaaagcgggtgacaatccgtacctgcggtataaccacgccgacgccgagtttcaggagcgtctgcaagaagatacgtcttttgggggcaacctcgggcgagcagtcttccaggccaagaagagggttctcgaaccttttggtctggttgaggaaggtgctaagacggctcctggaaagaaacgtccggtagagcagtcgccacaagagccagactcctcctcgggcattggcaagacaggccagcagcccgctaaaaagagactcaattttggtcagactggcgactcagagtcagtccccgacccacaacctctcggagaacctccagcaacccccgctgctgtgggacctactacaatggcttcaggcggtggcgcaccaatggcagacaataacgaaggcgccgacggagtgggtaatgcctcaggaaattggcattgcgattccacatggctgggcgacagagtcatcaccaccagcacccgaacatgggccttgcccacctataacaaccacctctacaagcaaatctccagtgcttcaacgggggccagcaacgacaaccactacttcggctacagcaccccctgggggtattttgatttcaacagattccactgccatttctcaccacgtgactggcagcgactcatcaacaacaattggggattccggcccaagagactcaacttcaagctcttcaacatccaagtcaaggaggtcacgacgaatgatggcgtcacgaccatcgctaataaccttaccagcacggttcaagtcttctcggactcggagtaccagttgccgtacgtcctcggctctgcgcaccagggctgcctccctccgttcccggcggacgtgttcatgattccgcagtacggctacctaacgctcaacaatggcagccaggcagtgggacggtcatccttttactgcctggaatatttcccatcgcagatgctgagaacgggcaataactttaccttcagctacaccttcgaggacgtgcctttccacagcagctacgcgcacagccagagcctggaccggctgatgaatcctctcatcgaccagtacctgtattacctgaacagaactcagaatcagtccggaagtgcccaaaacaaggacttgctgtttagccgggggtctccagctggcatgtctgttcagcccaaaaactggctacctggaccctgttaccggcagcagcgcgtttctaaaacaaaaacagacaacaacaacagcaactttacctggactggtgcttcaaaatataaccttaatgggcgtgaatctataatcaaccctggcactgctatggcctcacacaaagacgacaaagacaagttctttcccatgagcggtgtcatgatttttggaaaggagagcgccggagcttcaaacactgcattggacaatgtcatgatcacagacgaagaggaaatcaaagccactaaccccgtggccaccgaaagatttgggactgtggcagtcaatctccagagcagcagcacagaccctgcgaccggagatgtgcatgttatgggagccttacctggaatggtgtggcaagacagagacgtatacctgcagggtcctatttgggccaaaattcctcacacggatggacactttcacccgtctcctctcatgggcggctttggacttaagcacccgcctcctcagatcctcatcaaaaacacgcctgttcctgcgaatcctccggcagagttttcggctacaaagtttgcttcattcatcacccagtattccacaggacaagtgagcgtggagattgaatgggagctgcagaaagaaaacagcaaacgctggaatcccgaagtgcagtatacatctaactatgcaaaatctgccaacgttgatttcactgtggacaacaatggactttatactgagcctcgccccattggcacccgttacctcacccgtcccctgtaattgtgtgttaatcaataaaccggttaattcgtgtcagttgaactttggtctcatgtcgttattatcttatctggtcaccatagcaaccggttacacattaactgcttagttgcgcttcgcgaatacccctagtgatggagttgcccactccctctatgcgcgctcgctcgctcggtggggccggcagagcagagctctgccgtctgcggacctttggtccgcaggccccaccgagcgagcgagcgcgcatagagggagtgggcaa

SEQ ID NO: 467 - DNA, 2211 bp, unidentified
  source 1..2211: mol_type = unassigned DNA; note = Adeno-associated virus 6
atggctgccgatggttatcttccagattggctcgaggacaacctctctgagggcattcgcgagtggtgggacttgaaacctggagccccgaaacccaaagccaaccagcaaaagcaggacgacggccggggtctggtgcttcctggctacaagtacctcggacccttcaacggactcgacaagggggagcccgtcaacgcggcggatgcagcggccctcgagcacgacaaggcctacgaccagcagctcaaagcgggtgacaatccgtacctgcggtataaccacgccgacgccgagtttcaggagcgtctgcaagaagatacgtcttttgggggcaacctcgggcgagcagtcttccaggccaagaagagggttctcgaaccttttggtctggttgaggaaggtgctaagacggctcctggaaagaaacgtccggtagagcagtcgccacaagagccagactcctcctcgggcattggcaagacaggccagcagcccgctaaaaagagactcaattttggtcagactggcgactcagagtcagtccccgacccacaacctctcggagaacctccagcaacccccgctgctgtgggacctactacaatggcttcaggcggtggcgcaccaatggcagacaataacgaaggcgccgacggagtgggtaatgcctcaggaaattggcattgcgattccacatggctgggcgacagagtcatcaccaccagcacccgaacatgggccttgcccacctataacaaccacctctacaagcaaatctccagtgcttcaacgggggccagcaacgacaaccactacttcggctacagcaccccctgggggtattttgatttcaacagattccactgccatttctcaccacgtgactggcagcgactcatcaacaacaattggggattccggcccaagagactcaacttcaagctcttcaacatccaagtcaaggaggtcacgacgaatgatggcgtcacgaccatcgctaataaccttaccagcacggttcaagtcttctcggactcggagtaccagttgccgtacgtcctcggctctgcgcaccagggctgcctccctccgttcccggcggacgtgttcatgattccgcagtacggctacctaacgctcaacaatggcagccaggcagtgggacggtcatccttttactgcctggaatatttcccatcgcagatgctgagaacgggcaataactttaccttcagctacaccttcgaggacgtgcctttccacagcagctacgcgcacagccagagcctggaccggctgatgaatcctctcatcgaccagtacctgtattacctgaacagaactcagaatcagtccggaagtgcccaaaacaaggacttgctgtttagccgggggtctccagctggcatgtctgttcagcccaaaaactggctacctggaccctgttaccggcagcagcgcgtttctaaaacaaaaacagacaacaacaacagcaactttacctggactggtgcttcaaaatataaccttaatgggcgtgaatctataatcaaccctggcactgctatggcctcacacaaagacgacaaagacaagttctttcccatgagcggtgtcatgatttttggaaaggagagcgccggagcttcaaacactgcattggacaatgtcatgatcacagacgaagaggaaatcaaagccactaaccccgtggccaccgaaagatttgggactgtggcagtcaatctccagagcagcagcacagaccctgcgaccggagatgtgcatgttatgggagccttacctggaatggtgtggcaagacagagacgtatacctgcagggtcctatttgggccaaaattcctcacacggatggacactttcacccgtctcctctcatgggcggctttggacttaagcacccgcctcctcagatcctcatcaaaaacacgcctgttcctgcgaatcctccggcagagttttcggctacaaagtttgcttcattcatcacccagtattccacaggacaagtgagcgtggagattgaatgggagctgcagaaagaaaacagcaaacgctggaatcccgaagtgcagtatacatctaactatgcaaaatctgccaacgttgatttcactgtggacaacaatggactttatactgagcctcgccccattggcacccgttacctcacccgtcccctgtaa

SEQ ID NO: 468 - protein, 736 aa, unidentified; identical to SEQ ID NO: 464
  source 1..736: note = Adeno-associated virus

SEQ ID NO: 469 - protein, 736 aa, unidentified
  source 1..736: note = Adeno-associated virus
MAADGYLPDWLEDNLSEGIREWWDLKPGAPKPKANQQKQDDGRGLVLPGYKYLGPFNGLDKGEPVNAADAAALEHDKAYDQQLKAGDNPYLRYNHADAEFQERLQEDTSFGGNLGRAVFQAKKRVLEPFGLVEEGAKTAPGKKRPVEQSPQEPDSSSGIGKTGQQPAKKRLNFGQTGDSESVPDPQPLGEPPATPAAVGPTTMASGGGAPMADNNEGADGVGNASGNWHCDSTWLGDRVITTSTRTWALPTYNNHLYKQISSASTGASNDNHYFGYSTPWGYFDFNRFHCHFSPRDWQRLINNNWGFRPKRLNFKLFNIQVKEVTTNDGVTTIANNLTSTVQVFSDSEYQLPYVLGSAHQGCLPPFPADVFMIPQYGYLTLNNGSQAVGRSSFYCLEYFPSQMLRTGNNFTFSYTFEDVPFHSSYAHSQSLDRLMNPLIDQYLYYLNRTQNQSGSAQNKDLLFSRGSPAGMSVQPKNWLPGPCYRQQRVSKTKTDNNNSNFTWTGASKYNLNGRESIINPGTAMASHKDDEDKFFPMSGVMIFGKESAGASNTALDNVMITDEEEIKATNPVATERFGTVAVNLQSSSTDPATGDVHVMGALPGMVWQDRDVYLQGPIWAKIPHTDGHFHPSPLMGGFGLKHPPPQILIKNTPVPANPPAEFSATKFASFITQYSTGQVSVEIEWELQKENSKRWNPEVQYTSNYAKSANVDFTVDNNGLYTEPRPIGTRYLTRPL

SEQ ID NO: 470 - protein, 736 aa, unidentified
  source 1..736: note = Adeno-associated virus
MAADGYLPDWLEDNLSEGIREWWDLKPGAPKPKANQQKQDDGRGLVLPGYKYLGPFNGLDKGEPVNAADAAALEHDKAYDQQLKAGDNPYLRYNHADAEFQERLQEDTSFGGNLGRAVFQAKKRVLEPLGLVEEGAKTAPGKKRPVEQSPQEPDSSSGIGKTGQQPAKKRLNFGQTGDSESVPDPQPLGEPPATPAAVGPTTMASGGGAPMADNNEGADGVGNASGNWHCDSTWLGDRVITTSTRTWALPTYNNHLYKQISSASTGASNDNHYFGYSTPWGYFDFNRFHCHFSPRDWQRLINNNWGFRPKRLNFKLFNIQVKEVTTNDGVTTIANNLTSTVQVFSDSEYQLPYVLGSAHQGCLPPFPADVFMIPQYGYLTLNNGSQAVGRSSFYCLEYFPSQMLRTGNNFTFSYTFEDVPFHSSYAHSQSLDRLMNPLIDQYLYYLNRTQNQSGSAQNKDLLFSRGSPAGMSVQPKNWLPGPCYRQQRVSKTKTDNNNSNFTWTGASKYNLNGRESIINPGTAMASHKDDEDKFFPMSGVMIFGKESAGASNTALDNVMITDEEEIKATNPVATERFGTVAVNLQSSSTDPATGDVHVMGALPGMVWQDRDVYLQGPIWAKIPHTDGHFHPSPLMGGFGLKHPPPQILIKNTPVPANPPAEFSATKFASFITQYSTGQVSVEIEWELQKENSKRWNPEVQYTSNYAKSANVDFTVDNNGLYTEPRPIGTRYLTRPL

SEQ ID NO: 471 - protein, 736 aa, unidentified
  source 1..736: note = Adeno-associated virus
MAADGYLPDWLEDNLSEGIREWWDLKPGAPKPKANQQKQDDGRGLVLPGYKYLGPFNGLDKGEPVNAADAAALEHDKAYDQQLKAGDNPYLRYNHADAEFQERLQEDTSFGGNLGRAVFQAKKRVLEPLGLVEEGAKTAPGKKRPVEQSPQEPDSSSGIGKTGQQPAKKRLNFGQTGDSESVPDPQPLGEPPATPAAVGPTTMASGGGAPMADNNEGADGVGNASGNWHCDSTWLGDRVITTSTRTWALPTYNNHLYKQISSASTGASNDNHYFGYSTPWGYFDFNRFHCHFSPRDWQRLINNNWGFRPKRLNFKLFNIQVKEVTTNDGVTTIANNLTSTVQVFSDSEYQLPYVLGSAHQGCLPPFPADVFMIPQYGYLTLNNGSQAVGRSSFYCLEYFPSQMLRTGNNFTFSYTFEDVPFHSSYAHSQSLDRLMNPLIDQYLYYLNRTQNQSGSAQNKDLLFSRGSPAGMSVQPKNWLPGPCYRQQRVSKTKTDNNNSNFTWTGASKYNLNGRESIINPGTAMASHKDDKDKFFPMSGVMIFGKESAGASNTALDNVMITDEEEIKATNPVATERFGTVAVNLQSSSTDPATGDVHVMGALPGMVWQDRDVYLQGPIWAKIPHTDGHFHPSPLMGGFGLKHPPPQILIKNTPVPANPPAEFSATKFASFITQYSTGQVSVEIEWELQKENSKRWNPEVQYTSNYAKSANVDFTVDNNGLYTEPRPIGTRYLTRPL

SEQ ID NO: 472 - DNA, 2214 bp, unidentified
  source 1..2214: mol_type = unassigned DNA; note = Adeno-associated virus 7
atggctgccgatggttatcttccagattggctcgaggacaacctctctgagggcattcgcgagtggtgggacctgaaacctggagccccgaaacccaaagccaaccagcaaaagcaggacaacggccggggtctggtgcttcctggctacaagtacctcggacccttcaacggactcgacaagggggagcccgtcaacgcggcggacgcagcggccctcgagcacgacaaggcctacgaccagcagctcaaagcgggtgacaatccgtacctgcggtataaccacgccgacgccgagtttcaggagcgtctgcaagaagatacgtcatttgggggcaacctcgggcgagcagtcttccaggccaagaagcgggttctcgaacctctcggtctggttgaggaaggcgctaagacggctcctgcaaagaagagaccggtagagccgtcacctcagcgttcccccgactcctccacgggcatcggcaagaaaggccagcagcccgccagaaagagactcaatttcggtcagactggcgactcagagtcagtccccgaccctcaacctctcggagaacctccagcagcgccctctagtgtgggatctggtacagtggctgcaggcggtggcgcaccaatggcagacaataacgaaggtgccgacggagtgggtaatgcctcaggaaattggcattgcgattccacatggctgggcgacagagtcattaccaccagcacccgaacctgggccctgcccacctacaacaaccacctctacaagcaaatctccagtgaaactgcaggtagtaccaacgacaacacctacttcggctacagcaccccctgggggtattttgactttaacagattccactgccacttctcaccacgtgactggcagcgactcatcaacaacaactggggattccggcccaagaagctgcggttcaagctcttcaacatccaggtcaaggaggtcacgacgaatgacggcgttacgaccatcgctaataaccttaccagcacgattcaggtattctcggactcggaataccagctgccgtacgtcctcggctctgcgcaccagggctgcctgcctccgttcccggcggacgtcttcatgattcctcagtacggctacctgactctcaacaatggcagtcagtctgtgggacgttcctccttctactgcctggagtacttcccctctcagatgctgagaacgggcaacaactttgagttcagctacagcttcgaggacgtgcctttccacagcagctacgcacacagccagagcctggaccggctgatgaatcccctcatcgaccagtacttgtactacctggccagaacacagagtaacccaggaggcacagctggcaatcgggaactgcagttttaccagggcgggccttcaactatggccgaacaagccaagaattggttacctggaccttgcttccggcaacaaagagtctccaaaacgctggatcaaaacaacaacagcaactttgcttggactggtgccaccaaatatcacctgaacggcagaaactcgttggttaatcccggcgtcgccatggcaactcacaaggacgacgaggaccgctttttcccatccagcggagtcctgatttttggaaaaactggagcaactaacaaaactacattggaaaatgtgttaatgacaaatgaagaagaaattcgtcctactaatcctgtagccacggaagaatacgggatagtcagcagcaacttacaagcggctaatactgcagcccagacacaagttgtcaacaaccagggagccttacctggcatggtctggcagaaccgggacgtgtacctgcagggtcccatctgggccaagattcctcacacggatggcaactttcacccgtctcctttgatgggcggctttggacttaaacatccgcctcctcagatcctgatcaagaacactcccgttcccgctaatcctccggaggtgtttactcctgccaagtttgcttcgttcatcacacagtacagcaccggacaagtcagcgtggaaatcgagtgggagctgcagaaggaaaacagcaagcgctggaacccggagattcagtacacctccaactttgaaaagcagactggtgtggactttgccgttgacagccagggtgtttactctgagcctcgccctattggcactcgttacctcacccgtaatctgtaa

SEQ ID NO: 473 - protein, 738 aa, unidentified
  source 1..738: note = Adeno-associated virus 7
MAADGYLPDWLEDNLSEGIREWWALKPGAPKPKANQQKQDDGRGLVLPGYKYLGPFNGLDKGEPVNAADAAALEHDKAYDQQLQAGDNPYLRYNHADAEFQERLQEDTSFGGNLGRAVFQAKKRVLEPLGLVEEGAKTAPGKKRPVEPSPQRSPDSSTGIGKKGQQPARKRLNFGQTGDSESVPDPQPLGEPPAAPSGVGPNTMAAGGGAPMADNNEGADGVGSSSGNWHCDSTWLGDRVITTSTRTWALPTYNNHLYKQISNGTSGGATNDNTYFGYSTPWGYFDFNRFHCHFSPRDWQRLINNNWGFRPKRLSFKLFNIQVKEVTQNEGTKTIANNLTSTIQVFTDSEYQLPYVLGSAHQGCLPPFPADVFMIPQYGYLTLNNGSQAVGRSSFYCLEYFPSQMLRTGNNFQFTYTFEDVPFHSSYAHSQSLDRLMNPLIDQYLYYLSRTQTTGGTANTQTLGFSQGGPNTMANQAKNWLPGPCYRQQRVSTTTGQNNNSNFAWTAGTKYHLNGRNSLANPGIAMATHKDDEERFFPSNGILIFGKQNAARDNADYSDVMLTSEEEIKTTNPVATEEYGIVADNLQQQNTAPQIGTVNSQGALPGMVWQNRDVYLQGPIWAKIPHTDGNFHPSPLMGGFGLKHPPPQILIKNTPVPADPPTTFNQSKLNSFITQYSTGQVSVEIEWELQKENSKRWNPEIQYTSNYYKSTSVDFAVNTEGVYSEPRPIGTRYLTRNL

SEQ ID NO: 474 - protein, 737 aa, unidentified
  source 1..737: note = Adeno-associated virus 7
MAADGYLPDWLEDNLSEGIREWWDLKPGAPKPKANQQKQDNGRGLVLPGYKYLGPFNGLDKGEPVNAADAAALEHDKAYDQQLKAGDNPYLRYNHADAEFQERLQEDTSFGGNLGRAVFQAKKRVLEPLGLVEEGAKTAPAKKRPVEPSPQRSPDSSTGIGKKGQQPARKRLNFGQTGDSESVPDPQPLGEPPAAPSSVGSGTVAAGGGAPMADNNEGADGVGNASGNWHCDSTWLGDRVITTSTRTWALPTYNNHLYKQISSETAGSTNDNTYFGYSTPWGYFDFNRFHCHFSPRDWQRLINNNWGFRPKKLRFKLFNIQVKEVTTNDGVTTIANNLTSTIQVFSDSEYQLPYVLGSAHQGCLPPFPADVFMIPQYGYLTLNNGSQSVGRSSFYCLEYFPSQMLRTGNNFEFSYSFEDVPFHSSYAHSQSLDRLMNPLIDQYLYYLARTQSNPGGTAGNRELQFYQGGPSTMAEQAKNWLPGPCFRQQRVSKTLDQNNNSNFAWTGATKYHLNGRNSLVNPGVAMATHKDDEDRFFPSSGVLIFGKTGATNKTTLENVLMTNEEEIRPTNPVATEEYGIVSSNLQAANTAAQTQVVNNQGALPGMVWQNRDVYLQGPIWAKIPHTDGNFHPSPLMGGFGLKHPPPQILIKNTPVPANPPEVFTPAKFASFITQYSTGQVSVEIEWELQKENSKRWNPEIQYTSNFEKQTGVDFAVDSQGVYSEPRPIGTRYLTRNL

SEQ ID NO: 475 - protein, 623 aa, unidentified
  source 1..623: note = Adeno-associated virus 7
MPGFYEIVIKVPSDLDEHLPGISDSFVNWVAEKEWELPPDSDMDLNLIEQAPLTVAEKLQRDFLVQWRRVSKAPEALFFVQFEKGESYFHLHVLVETTGVKSMVLGRFLSQIREKLVQTIYRGVEPTLPNWFAVTKTRNGAGGGNKVVDECYIPNYLLPKTQPELQWAWTNMEEYISACLNLAERKRLVAQHLTHVSQTQEQNKENLNPNSDAPVIRSKTSARYMELVGWLVDRGITSEKQWIQEDQASYISFNAASNSRSQIKAALDNAGKIMALTKSAPDYLVGPSLPADIKTNRIYRILELNGYDPAYAGSVFLGWAQKKFGKRNTIWLFGPATTGKTNIAEAIAHAVPFYGCVNWTNENFPFNDCVDKMVIWWEEGKMTAKVVESAKAILGGSKVRVDQKCKSSAQIDPTPVIVTSNTNMCAVIDGNSTTFEHQQPLQDRMFKFELTRRLEHDFGKVTKQEVKEFFRWASDHVTEVAHEFYVRKGGASKRPAPDDADISEPKRACPSVADPSTSDAEGAPVDFADRYQNKCSRHAGMIQMLFPCKTCERMNQNFNICFTHGVRDCLECFPGVSESQPVVRKKTYRKLCAIHHLLGRAPEIACSACDLVNVDLDDCVSEQ

SEQ ID NO: 476 - DNA, 4721 bp, unidentified
  source 1..4721: mol_type = unassigned DNA; note = Adeno-associated virus 7
ttggccactccctctatgcgcgctcgctcgctcggtggggcctgcggaccaaaggtccgcagacggcagagctctgctctgccggccccaccgagcgagcgagcgcgcatagagggagtggccaactccatcactaggggtaccgcgaagcgcctcccacgctgccgcgtcagcgctgacgtaaatcacgtcataggggagtggtcctgtattagctgtcacgtgagtgcttttgcgacattttgcgacaccacgtggccatttgaggtatatatggccgagtgagcgagcaggatctccattttgaccgcgaaatttgaacgagcagcagccatgccgggtttctacgagatcgtgatcaaggtgccgagcgacctggacgagcacctgccgggcatttctgactcgtttgtgaactgggtggccgagaaggaatgggagctgcccccggattctgacatggatctgaatctgatcgagcaggcacccctgaccgtggccgagaagctgcagcgcgacttcctggtccaatggcgccgcgtgagtaaggccccggaggccctgttctttgttcagttcgagaagggcgagagctacttccaccttcacgttctggtggagaccacgggggtcaagtccatggtgctaggccgcttcctgagtcagattcgggagaagctggtccagaccatctaccgcggggtcgagcccacgctgcccaactggttcgcggtgaccaagacgcgtaatggcgccggcggggggaacaaggtggtggacgagtgctacatccccaactacctcctgcccaagacccagcccgagctgcagtgggcgtggactaacatggaggagtatataagcgcgtgtttgaacctggccgaacgcaaacggctcgtggcgcagcacctgacccacgtcagccagacgcaggagcagaacaaggagaatctgaaccccaattctgacgcgcccgtgatcaggtcaaaaacctccgcgcgctacatggagctggtcgggtggctggtggaccggggcatcacctccgagaagcagtggatccaggaggaccaggcctcgtacatctccttcaacgccgcctccaactcgcggtcccagatcaaggccgcgctggacaatgccggcaagatcatggcgctgaccaaatccgcgcccgactacctggtggggccctcgctgcccgcggacattaaaaccaaccgcatctaccgcatcctggagctgaacgggtacgatcctgcctacgccggctccgtctttctcggctgggcccagaaaaagttcgggaagcgcaacaccatctggctgtttgggcccgccaccaccggcaagaccaacattgcggaagccatcgcccacgccgtgcccttctacggctgcgtcaactggaccaatgagaactttcccttcaacgattgcgtcgacaagatggtgatctggtgggaggagggcaagatgacggccaaggtcgtggagtccgccaaggccattctcggcggcagcaaggtgcgcgtggaccaaaagtgcaagtcgtccgcccagatcgaccccacccccgtgatcgtcacctccaacaccaacatgtgcgccgtgattgacgggaacagcaccaccttcgagcaccagcagccgttgcaggaccggatgttcaaatttgaactcacccgccgtctggagcacgactttggcaaggtgacgaagcaggaagtcaaagagttcttccgctgggccagtgatcacgtgaccgaggtggcgcatgagttctacgtcagaaagggcggagccagcaaaagacccgcccccgatgacgcggatataagcgagcccaagcgggcctgcccctcagtcgcggatccatcgacgtcagacgcggaaggagctccggtggactttgccgacaggtaccaaaacaaatgttctcgtcacgcgggcatgattcagatgctgtttccctgcaaaacgtgcgagagaatgaatcagaatttcaacatttgcttcacacacggggtcagagactgtttagagtgtttccccggcgtgtcagaatctcaaccggtcgtcagaaaaaagacgtatcggaaactctgcgcgattcatcatctgctggggcgggcgcccgagattgcttgctcggcctgcgacctggtcaacgtggacctggacgactgcgtttctgagcaataaatgacttaaaccaggtatggctgccgatggttatcttccagattggctcgaggacaacctctctgagggcattcgcgagtggtgggacctgaaacctggagccccgaaacccaaagccaaccagcaaaagcaggacaacggccggggtctggtgcttcctggctacaagtacctcggacccttcaacggactcgacaagggggagcccgtcaacgcggcggacgcagcggccctcgagcacgacaaggcctacgaccagcagctcaaagcgggtgacaatccgtacctgcggtataaccacgccgacgccgagtttcaggagcgtctgcaagaagatacgtcatttgggggcaacctcgggcgagcagtcttccaggccaagaagcgggttctcgaacctctcggtctggttgaggaaggcgctaagacggctcctgcaaagaagagaccggtagagccgtcacctcagcgttcccccgactcctccacgggcatcggcaagaaaggccagcagcccgccagaaagagactcaatttcggtcagactggcgactcagagtcagtccccgaccctcaacctctcggagaacctccagcagcgccctctagtgtgggatctggtacagtggctgcaggcggtggcgcaccaatggcagacaataacgaaggtgccgacggagtgggtaatgcctcaggaaattggcattgcgattccacatggctgggcgacagagtcattaccaccagcacccgaacctgggccctgcccacctacaacaaccacctctacaagcaaatctccagtgaaactgcaggtagtaccaacgacaacacctacttcggctacagcaccccctgggggtattttgactttaacagattccactgccacttctcaccacgtgactggcagcgactcatcaacaacaactggggattccggcccaagaagctgcggttcaagctcttcaacatccaggtcaaggaggtcacgacgaatgacggcgttacgaccatcgctaataaccttaccagcacgattcaggtattctcggactcggaataccagctgccgtacgtcctcggctctgcgcaccagggctgcctgcctccgttcccggcggacgtcttcatgattcctcagtacggctacctgactctcaacaatggcagtcagtctgtgggacgttcctccttctactgcctggagtacttcccctctcagatgctgagaacgggcaacaactttgagttcagctacagcttcgaggacgtgcctttccacagcagctacgcacacagccagagcctggaccggctgatgaatcccctcatcgaccagtacttgtactacctggccagaacacagagtaacccaggaggcacagctggcaatcgggaactgcagttttaccagggcgggccttcaactatggccgaacaagccaagaattggttacctggaccttgcttccggcaacaaagagtctccaaaacgctggatcaaaacaacaacagcaactttgcttggactggtgccaccaaatatcacctgaacggcagaaactcgttggttaatcccggcgtcgccatggcaactcacaaggacgacgaggaccgctttttcccatccagcggagtcctgatttttggaaaaactggagcaactaacaaaactacattggaaaatgtgttaatgacaaatgaagaagaaattcgtcctactaatcctgtagccacggaagaatacgggatagtcagcagcaacttacaagcggctaatactgcagcccagacacaagttgtcaacaaccagggagccttacctggcatggtctggcagaaccgggacgtgtacctgcagggtcccatctgggccaagattcctcacacggatggcaactttcacccgtctcctttgatgggcggctttggacttaaacatccgcctcctcagatcctgatcaagaacactcccgttcccgctaatcctccggaggtgtttactcctgccaagtttgcttcgttcatcacacagtacagcaccggacaagtcagcgtggaaatcgagtgggagctgcagaaggaaaacagcaagcgctggaacccggagattcagtacacctccaactttgaaaagcagactggtgtggactttgccgttgacagccagggtgtttactctgagcctcgccctattggcactcgttacctcacccgtaatctgtaattgcatgttaatcaataaaccggttgattcgtttcagttgaactttggtctcctgtgcttcttatcttatcggtttccatagcaactggttacacattaactgcttgggtgcgcttcacgataagaacactgacgtcaccgcggtacccctagtgatggagttggccactccctctatgcgcgctcgctcgctcggtggggcctgcggaccaaaggtccgcagacggcagagctctgctctgccggccccaccgagcgagcgagcgcgcatagagggagtggccaa

SEQ ID NO: 477 - DNA, 2214 bp, unidentified; identical to SEQ ID NO: 472
  source 1..2214: mol_type = unassigned DNA; note = Adeno-associated virus 7

SEQ ID NO: 478 - protein, 737 aa, unidentified; identical to SEQ ID NO: 474
  source 1..737: note = Adeno-associated virus 7

SEQ ID NO: 479 - DNA, 2217 bp, unidentified
  source 1..2217: mol_type = unassigned DNA; note = Adeno-associated virus 8
atggctgccgatggttatcttccagattggctcgaggacaacctctctgagggcattcgcgagtggtgggcgctgaaacctggagccccgaagcccaaagccaaccagcaaaagcaggacgacggccggggtctggtgcttcctggctacaagtacctcggacccttcaacggactcgacaagggggagcccgtcaacgcggcggacgcagcggccctcgagcacgacaaggcctacgaccagcagctgcaggcgggtgacaatccgtacctgcggtataaccacgccgacgccgagtttcaggagcgtctgcaagaagatacgtcttttgggggcaacctcgggcgagcagtcttccaggccaagaagcgggttctcgaacctctcggtctggttgaggaaggcgctaagacggctcctggaaagaagagaccggtagagccatcaccccagcgttctccagactcctctacgggcatcggcaagaaaggccaacagcccgccagaaaaagactcaattttggtcagactggcgactcagagtcagttccagaccctcaacctctcggagaacctccagcagcgccctctggtgtgggacctaatacaatggctgcaggcggtggcgcaccaatggcagacaataacgaaggcgccgacggagtgggtagttcctcgggaaattggcattgcgattccacatggctgggcgacagagtcatcaccaccagcacccgaacctgggccctgcccacctacaacaaccacctctacaagcaaatctccaacgggacatcgggaggagccaccaacgacaacacctacttcggctacagcaccccctgggggtattttgactttaacagattccactgccacttttcaccacgtgactggcagcgactcatcaacaacaactggggattccggcccaagagactcagcttcaagctcttcaacatccaggtcaaggaggtcacgcagaatgaaggcaccaagaccatcgccaataacctcaccagcaccatccaggtgtttacggactcggagtaccagctgccgtacgttctcggctctgcccaccagggctgcctgcctccgttcccggcggacgtgttcatgattccccagtacggctacctaacactcaacaacggtagtcaggccgtgggacgctcctccttctactgcctggaatactttccttcgcagatgctgagaaccggcaacaacttccagtttacttacaccttcgaggacgtgcctttccacagcagctacgcccacagccagagcttggaccggctgatgaatcctctgattgaccagtacctgtactacttgtctcggactcaaacaacaggaggcacggcaaatacgcagactctgggcttcagccaaggtgggcctaatacaatggccaatcaggcaaagaactggctgccaggaccctgttaccgccaacaacgcgtctcaacgacaaccgggcaaaacaacaatagcaactttgcctggactgctgggaccaaataccatctgaatggaagaaattcattggctaatcctggcatcgctatggcaacacacaaagacgacgaggagcgtttttttcccagtaacgggatcctgatttttggcaaacaaaatgctgccagagacaatgcggattacagcgatgtcatgctcaccagcgaggaagaaatcaaaaccactaaccctgtggctacagaggaatacggtatcgtggcagataacttgcagcagcaaaacacggctcctcaaattggaactgtcaacagccagggggccttacccggtatggtctggcagaaccgggacgtgtacctgcagggtcccatctgggccaagattcctcacacggacggcaacttccacccgtctccgctgatgggcggctttggcctgaaacatcctccgcctcagatcctgatcaagaacacgcctgtacctgcggatcctccgaccaccttcaaccagtcaaagctgaactctttcatcacgcaatacagcaccggacaggtcagcgtggaaattgaatgggagctgcagaaggaaaacagcaagcgctggaaccccgagatccagtacacctccaactactacaaatctacaagtgtggactttgctgttaatacagaaggcgtgtactctgaaccccgccccattggcacccgttacctcacccgtaatctgtaa

SEQ ID NO: 480 - DNA, 2213 bp, unidentified
  source 1..2213: mol_type = unassigned DNA; note = Adeno-associated virus 8
atggctgccgatggttatcttccagattggctcgaggacaacctctctgagggcattcgcgagtggtgggcgctgaaacctggagccccgaagcccaaagccaaccagcaaaagcaggacgacggccggggtctggtgcttcctggctacaagtacctcggacccttcaacggactcgacaagggggagcccgtcaacgcggcggacgcagcggccctcgagcacgacaaggcctacgaccagcagctgcaggcgggtgacaatccgtacctgcggtataaccacgccgacgccgagtttcaggagcgtctgcaagaagatacgtcttttgggggcaacctcgggcgagcagtcttccaggccaagaagcgggttctcgaacctctcggtctggttgaggaaggcgctaagacggctcctggaaagaagagaccggtagagccatcaccccagcgttctccagactcctctacgggcatcggcaagaaaggccaacagcccgccagaaaaagactcaattttggtcagactggcgactcagagtcagttccagaccctcaacctctcggagaacctccagcagcgccctctggtgtgggacctaatacaatggctgcaggcggtggcgcaccaatggcagacaataacgaaggcgccgacggagtgggtagttcctcgggaaattggcattgcgattccacatggctgggcgacagagtcatcaccaccagcacccgaacctgggccctgcccacctacaacaaccacctctacaagcaaatctccaacgggacatcgggaggagccaccaacgacaacacctacttcggctacagcaccccctgggggtattttgactttaacagattccactgccacttttcaccacgtgactggcagcgactcatcaacaacaactggggattccggcccaagagactcagcttcaagctcttcaacatccaggtcaaggaggtcacgcagaatgaaggcaccaagaccatcgccaataacctcaccagcaccatccaggtgtttacggactcggagtaccagctgccgtacgttctcggctctgcccaccagggctgcctgcctccgttcccggcggacgtgttcatgattccccagtacggctacctaacactcaacaacggtagtcaggccgtgggacgctcctccttctactgcctggaatactttccttcgcagatgctgagaaccggcaacaacttccagtttacttacaccttcgaggacgtgcctttccacagcagctacgcccacagccagagcttggaccggctgatgaatcctctgattgaccagtacctgtactacttgtctcggactcaaacaacaggaggcacggcaaatacgcagactctgggcttcagccaaggtgggcctaatacaatggccaatcaggcaaagaactggctgccaggaccctgttaccgccaacaacgcgtctcaacgacaaccgggcaaaacaacaatagcaactttgcctggactgctgggaccaaataccatctgaatggaagaaattcattggctaatcctggcatcgctatggcaacacacaaagacgacgaggagcgtttttttcccagtaacgggatcctgatttttggcaaacaaaatgctgccagagacaatgcggattacagcgatgtcatgctcaccagcgaggaagaaatcaaaaccactaaccctgtggctacagaggaatacggtatcgtggcagataacttgcagcagcaaaacacggctcctcaaattggaactgtcaacagccagggggccttacccggtatggtctggcagaaccgggacgtgtacctgcagggtcccatctgggccaagattcctcacacggacggcaacttccacccgtctccgctgatgggcggctttggcctgaaacatcctccgcctcagatcctgatcaagaacacgcctgtacctgcggatcctccgaccaccttcaaccagtcaaagctgaactctttcatcacgcaatacagcaccggacaggtcagcgtggaaattgaatgggagctgcagaaggaaaacagcaagcgctggaaccccgagatccagtacacctccaactactacaaatctacaagtgtggactttgctgtaatacagaaggcgtgtactctgaaccccgccccattggcacccgttacctcacccgtaatctg

SEQ ID NO: 481 - DNA, 4393 bp, unidentified
  source 1..4393: mol_type = unassigned DNA; note = Adeno-associated virus 8
cagagagggagtggccaactccatcactaggggtagcgcgaagcgcctcccacgctgccgcgtcagcgctgacgtaaattacgtcataggggagtggtcctgtattagctgtcacgtgagtgcttttgcggcattttgcgacaccacgtggccatttgaggtatatatggccgagtgagcgagcaggatctccattttgaccgcgaaatttgaacgagcagcagccatgccgggcttctacgagatcgtgatcaaggtgccgagcgacctggacgagcacctgccgggcatttctgactcgtttgtgaactgggtggccgagaaggaatgggagctgcccccggattctgacatggatcggaatctgatcgagcaggcacccctgaccgtggccgagaagctgcagcgcgacttcctggtccaatggcgccgcgtgagtaaggccccggaggccctcttctttgttcagttcgagaagggcgagagctactttcacctgcacgttctggtcgagaccacgggggtcaagtccatggtgctaggccgcttcctgagtcagattcgggaaaagcttggtccagaccatctacccgcggggtcgagccccaccttgcccaactggttcgcggtgaccaaagacgcggtaatggcgccggcgggggggaacaaggtggtggacgagtgctacatccccaactacctcctgcccaagactcagcccgagctgcagtgggcgtggactaacatggaggagtatataagcgcgtgcttgaacctggccgagcgcaaacggctcgtggcgcagcacctgacccacgtcagccagacgcaggagcagaacaaggagaatctgaaccccaattctgacgcgcccgtgatcaggtcaaaaacctccgcgcgctatatggagctggtcgggtggctggtggaccggggcatcacctccgagaagcagtggatccaggaggaccaggcctcgtacatctccttcaacgccgcctccaactcgcggtcccagatcaaggccgcgctggacaatgccggcaagatcatggcgctgaccaaatccgcgcccgactacctggtggggccctcgctgcccgcggacattacccagaaccgcatctaccgcatcctcgctctcaacggctacgaccctgcctacgccggctccgtctttctcggctgggctcagaaaaagttcgggaaacgcaacaccatctggctgtttggacccgccaccaccggcaagaccaacattgcggaagccatcgcccacgccgtgcccttctacggctgcgtcaactggaccaatgagaactttcccttcaatgattgcgtcgacaagatggtgatctggtgggaggagggcaagatgacggccaaggtcgtggagtccgccaaggccattctcggcggcagcaaggtgcgcgtggaccaaaagtgcaagtcgtccgcccagatcgaccccacccccgtgatcgtcacctccaacaccaacatgtgcgccgtgattgacgggaacagcaccaccttcgagcaccagcagcctctccaggaccggatgtttaagttcgaactcacccgccgtctggagcacgactttggcaaggtgacaaagcaggaagtcaaagagttcttccgctgggccagtgatcacgtgaccgaggtggcgcatgagttttacgtcagaaagggcggagccagcaaaagacccgcccccgatgacgcggataaaagcgagcccaagcgggcctgcccctcagtcgcggatccatcgacgtcagacgcggaaggagctccggtggactttgccgacaggtaccaaaacaaatgttctcgtcacgcgggcatgcttcagatgctgtttccctgcaaaacgtgcgagagaatgaatcagaatttcaacatttgcttcacacacggggtcagagactgctcagagtgtttccccggcgtgtcagaatctcaaccggtcgtcagaaagaggacgtatcggaaactctgtgcgattcatcatctgctggggcgggctcccgagattgcttgctcggcctgcgatctggtcaacgtggacctggatgactgtgtttctgagcaataaatgacttaaaccaggtatggctgccgatggttatcttccagattggctcgaggacaacctctctgagggcattcgcgagtggtgggcgctgaaacctggagccccgaagcccaaagccaaccagcaaaagcaggacgacggccggggtctggtgcttcctggctacaagtacctcggacccttcaacggactcgacaagggggagcccgtcaacgcggcggacgcagcggccctcgagcacgacaaggcctacgaccagcagctgcaggcgggtgacaatccgtacctgcggtataaccacgccgacgccgagtttcaggagcgtctgcaagaagatacgtcttttgggggcaacctcgggcgagcagtcttccaggccaagaagcgggttctcgaacctctcggtctggttgaggaaggcgctaagacggctcctggaaagaagagaccggtagagccatcaccccagcgttctccagactcctctacgggcatcggcaagaaaggccaacagcccgccagaaaaagactcaattttggtcagactggcgactcagagtcagttccagaccctcaacctctcggagaacctccagcagcgccctctggtgtgggacctaatacaatggctgcaggcggtggcgcaccaatggcagacaataacgaaggcgccgacggagtgggtagttcctcgggaaattggcattgcgattccacatggctgggcgacagagtcatcaccaccagcacccgaacctgggccctgcccacctacaacaaccacctctacaagcaaatctccaacgggacatcgggaggagccaccaacgacaacacctacttcggctacagcaccccctgggggtattttgactttaacagattccactgccacttttcaccacgtgactggcagcgactcatcaacaacaactggggattccggcccaagagactcagcttcaagctcttcaacatccaggtcaaggaggtcacgcagaatgaaggcaccaagaccatcgccaataacctcaccagcaccatccaggtgtttacggactcggagtaccagctgccgtacgttctcggctctgcccaccagggctgcctgcctccgttcccggcggacgtgttcatgattccccagtacggctacctaacactcaacaacggtagtcaggccgtgggacgctcctccttctactgcctggaatactttccttcgcagatgctgagaaccggcaacaacttccagtttacttacaccttcgaggacgtgcctttccacagcagctacgcccacagccagagcttggaccggctgatgaatcctctgattgaccagtacctgtactacttgtctcggactcaaacaacaggaggcacggcaaatacgcagactctgggcttcagccaaggtgggcctaatacaatggccaatcaggcaaagaactggctgccaggaccctgttaccgccaacaacgcgtctcaacgacaaccgggcaaaacaacaatagcaactttgcctggactgctgggaccaaataccatctgaatggaagaaattcattggctaatcctggcatcgctatggcaacacacaaagacgacgaggagcgtttttttcccagtaacgggatcctgatttttggcaaacaaaatgctgccagagacaatgcggattacagcgatgtcatgctcaccagcgaggaagaaatcaaaaccactaaccctgtggctacagaggaatacggtatcgtggcagataacttgcagcagcaaaacacggctcctcaaattggaactgtcaacagccagggggccttacccggtatggtctggcagaaccgggacgtgtacctgcagggtcccatctgggccaagattcctcacacggacggcaacttccacccgtctccgctgatgggcggctttggcctgaaacatcctccgcctcagatcctgatcaagaacacgcctgtacctgcggatcctccgaccaccttcaaccagtcaaagctgaactctttcatcacgcaatacagcaccggacaggtcagcgtggaaattgaatgggagctgcagaaggaaaacagcaagcgctggaaccccgagatccagtacacctccaactactacaaatctacaagtgtggactttgctgttaatacagaaggcgtgtactctgaaccccgccccattggcacccgttacctcacccgtaatctgtaattgcctgttaatcaataaaccggttgattcgtttcagttgaactttggtctctgcg

SEQ ID NO: 482 - protein, 738 aa, unidentified; identical to SEQ ID NO: 473
  source 1..738: note = Adeno-associated virus 8

SEQ ID NO: 483 - protein, 737 aa, unidentified
  source 1..737: note = Adeno-associated virus 8
MAADGYLPDWLEDNLSEGIREWWALKPGAPKPKANQQKQDDGRGLVLPGYKYLGPFNGLDKGEPVNAADAAALEHDKAYDQQLQAGDNPYLRYNHADAEFQERLQEDTSFGGNLGRAVFQAKKRVLEPLGLVEEGAKTAPGKKRPVEPSPQRSPDSSTGIGKKGQQPARKRLNFGQTGDSESVPDPQPLGEPPAAPSGVGPNTMAAGGGAPMADNNEGADGVGSSSGNWHCDSTWLGDRVITTSTRTWALPTYNNHLYKQISNGTSGGATNDNTYFGYSTPWGYFDFNRFHCHFSPRDWQRLINNNWGFRPKRLSFKLFNIQVKEVTQNEGTKTIANNLTSTIQVFTDSEYQLPYVLGSAHQGCLPPFPADVFMIPQYGYLTLNNGSQAVGRSSFYCLEYFPSQMLRTGNNFQFTYTFEDVPFHSSYAHSQSLDRLMNPLIDQYLYYLSRTQTTGGTANTQTLGFSQGGPNTMANQAKNWLPGPCYRQQRVSTTTGQNNNSNFAWTAGTKYHLNGRNSLANPGIAMATHKDDEERFFPSNGILIFGKQNAARDNADYSDVMLTSEEEIKTTNPVATEEYGIVADNLQQQNTAPQIGTVNSQGALPGMVWQNRDVYLQGPIWAKIPHTDGNFHPSPLMGGFGLKHPPPQILIKNTPVPADPPTTFNQSKLNSFITQYSTGQVSVEIEWELQKENSKRWNPEIQYTSNYYKSTSVDFAVIQKACTLNPAPLAPVTSPVI

SEQ ID NO: 484 - DNA, 2217 bp, unidentified; identical to SEQ ID NO: 479
  source 1..2217: mol_type = unassigned DNA; note = Adeno-associated virus 8

SEQ ID NO: 485 - DNA, 2214 bp, synthetic construct
  source 1..2214: mol_type = other DNA; note = Description of Artificial Sequence: Synthetic polynucleotide
atggctgccgatggttatcttccagattggctcgaggacaacctctctgagggcattcgcgagtggtgggcgctgaaacctggagccccgaagcccaaagccaaccagcaaaagcaggacgacggccggggtctggtgcttcctggctacaagtacctcggacccttcaacggactcgacaagggggagcccgtcaacgcggcggacgcagcggccctcgagcacgacaaggcctacgaccagcagctgcaggcgggtgacaatccgtacctgcggtataaccacgccgacgccgagtttcaggagcgtctgcaagaagatacgtcttttgggggcaacctcgggcgagcagtcttccaggccaagaagcgggttctcgaacctctcggtctggttgaggaaggcgctaagacggctcctggaaagaagagaccggtagagccatcaccccagcgttctccagactcctctacgggcatcggcaagaaaggccaacagcccgccagaaaaagactcaattttggtcagactggcgactcagagtcagttccagaccctcaacctctcggagaacctccagcagcgccctctggtgtgggacctaatacaatggctgcaggcggtggcgcaccaatggcagacaataacgaaggcgccgacggagtgggtagttcctcgggaaattggcattgcgattccacatggctgggcgacagagtcatcaccaccagcacccgaacctgggccctgcccacctacaacaaccacctctacaagcaaatctccaacgggacatcgggaggagccaccaacgacaacacctacttcggctacagcaccccctgggggtattttgactttaacagattccactgccacttttcaccacgtgactggcagcgactcatcaacaacaactggggattccggcccaagagactcagcttcaagctcttcaacatccaggtcaaggaggtcacgcagaatgaaggcaccaagaccatcgccaataacctcaccagcaccatccaggtgtttacggactcggagtaccagctgccgtacgttctcggctctgcccaccagggctgcctgcctccgttcccggcggacgtgttcatgattccccagtacggctacctaacactcaacaacggtagtcaggccgtgggacgctcctccttctactgcctggaatactttccttcgcagatgctgagaaccggcaacaacttccagtttacttacaccttcgaggacgtgcctttccacagcagctacgcccacagccagagcttggaccggctgatgaatcctctgattgaccagtacctgtactacttgtctcggactcaaacaacaggaggcacggcaaatacgcagactctgggcttcagccaaggtgggcctaatacaatggccaatcaggcaaagaactggctgccaggaccctgttaccgccaacaacgcgtctcaacgacaaccgggcaaaacaacaatagcaactttgcctggactgctgggaccaaataccatctgaatggaagaaattcattggctaatcctggcatcgctatggcaacacacaaagacgacgaggagcgtttttttcccagtaacgggatcctgatttttggcaaacaaaatgctgccagagacaatgcggattacagcgatgtcatgctcaccagcgaggaagaaatcaaaaccactaaccctgtggctacagaggaatacggtatcgtggcagataacttgcctgagcggacggcgatgagtcttccgggaactgtcaacagccagggggccttacccggtatggtctggcagaaccgggacgtgtacctgcagggtcccatctgggccaagattcctcacacggacggcaacttccacccgtctccgctgatgggcggctttggcctgaaacatcctccgcctcagatcctgatcaagaacacgcctgtacctgcggatcctccgaccaccttcaaccagtcaaagctgaactctttcatcacgcaatacagcaccggacaggtcagcgtggaaattgaatgggagctgcagaaggaaaacagcaagcgctggaaccccgagatccagtacacctccaactactacaaatctacaagtgtggactttgctgttaatacagaaggcgtgtactctgaaccccgccccattggcacccgttacctcacccgtaatctg

SEQ ID NO: 486 - protein, 738 aa, synthetic construct
  source 1..738: note = Description of Artificial Sequence: Synthetic polypeptide
MAADGYLPDWLEDNLSEGIREWWALKPGAPKPKANQQKQDDGRGLVLPGYKYLGPFNGLDKGEPVNAADAAALEHDKAYDQQLQAGDNPYLRYNHADAEFQERLQEDTSFGGNLGRAVFQAKKRVLEPLGLVEEGAKTAPGKKRPVEPSPQRSPDSSTGIGKKGQQPARKRLNFGQTGDSESVPDPQPLGEPPAAPSGVGPNTMAAGGGAPMADNNEGADGVGSSSGNWHCDSTWLGDRVITTSTRTWALPTYNNHLYKQISNGTSGGATNDNTYFGYSTPWGYFDFNRFHCHFSPRDWQRLINNNWGFRPKRLSFKLFNIQVKEVTQNEGTKTIANNLTSTIQVFTDSEYQLPYVLGSAHQGCLPPFPADVFMIPQYGYLTLNNGSQAVGRSSFYCLEYFPSQMLRTGNNFQFTYTFEDVPFHSSYAHSQSLDRLMNPLIDQYLYYLSRTQTTGGTANTQTLGFSQGGPNTMANQAKNWLPGPCYRQQRVSTTTGQNNNSNFAWTAGTKYHLNGRNSLANPGIAMATHKDDEERFFPSNGILIFGKQNAARDNADYSDVMLTSEEEIKTTNPVATEEYGIVADNLPERTAMSLPGTVNSQGALPGMVWQNRDVYLQGPIWAKIPHTDGNFHPSPLMGGFGLKHPPPQILIKNTPVPADPPTTFNQSKLNSFITQYSTGQVSVEIEWELQKENSKRWNPEIQYTSNYYKSTSVDFAVNTEGVYSEPRPIGTRYLTRNL

SEQ ID NO: 487 - DNA, 2214 bp, synthetic construct
  source 1..2214: mol_type = other DNA; note = Description of Artificial Sequence: Synthetic polynucleotide
atggctgccgatggttatcttccagattggctcgaggacaacctctctgagggcattcgcgagtggtgggcgctgaaacctggagccccgaagcccaaagccaaccagcaaaagcaggacgacggccggggtctggtgcttcctggctacaagtacctcggacccttcaacggactcgacaagggggagcccgtcaacgcggcggacgcagcggccctcgagcacgacaaggcctacgaccagcagctgcaggcgggtgacaatccgtacctgcggtataaccacgccgacgccgagtttcaggagcgtctgcaagaagatacgtcttttgggggcaacctcgggcgagcagtcttccaggccaagaagcgggttctcgaacctctcggtctggttgaggaaggcgctaagacggctcctggaaagaagagaccggtagagccatcaccccagcgttctccagactcctctacgggcatcggcaagaaaggccaacagcccgccagaaaaagactcaattttggtcagactggcgactcagagtcagttccagaccctcaacctctcggagaacctccagcagcgccctctggtgtgggacctaatacaatggctgcaggcggtggcgcaccaatggcagacaataacgaaggcgccgacggagtgggtagttcctcgggaaattggcattgcgattccacatggctgggcgacagagtcatcaccaccagcacccgaacctgggccctgcccacctacaacaaccacctctacaagcaaatctccaacgggacatcgggaggagccaccaacgacaacacctacttcggctacagcaccccctgggggtattttgactttaacagattccactgccacttttcaccacgtgactggcagcgactcatcaacaacaactggggattccggcccaagagactcagcttcaagctcttcaacatccaggtcaaggaggtcacgcagaatgaaggcaccaagaccatcgccaataacctcaccagcaccatccaggtgtttacggactcggagtaccagctgccgtacgttctcggctctgcccaccagggctgcctgcctccgttcccggcggacgtgttcatgattccccagtacggctacctaacactcaacaacggtagtcaggccgtgggacgctcctccttctactgcctggaatactttccttcgcagatgctgagaaccggcaacaacttccagtttacttacaccttcgaggacgtgcctttccacagcagctacgcccacagccagagcttggaccggctgatgaatcctctgattgaccagtacctgtactacttgtctcggactcaaacaacaggaggcacggcaaatacgcagactctgggcttcagccaaggtgggcctaatacaatggccaatcaggcaaagaactggctgccaggaccctgttaccgccaacaacgcgtctcaacgacaaccgggcaaaacaacaatagcaactttgcctggactgctgggaccaaataccatctgaatggaagaaattcattggctaatcctggcatcgctatggcaacacacaaagacgacgaggagcgtttttttcccagtaacgggatcctgatttttggcaaacaaaatgctgccagagacaatgcggattacagcgatgtcatgctcaccagcgaggaagaaatcaaaaccactaaccctgtggctacagaggaatacggtatcgtggcagataacttgagttttagtcgtgcggttctttgtgatggaactgtcaacagccagggggccttacccggtatggtctggcagaaccgggacgtgtacctgcagggtcccatctgggccaagattcctcacacggacggcaacttccacccgtctccgctgatgggcggctttggcctgaaacatcctccgcctcagatcctgatcaagaacacgcctgtacctgcggatcctccgaccaccttcaaccagtcaaagctgaactctttcatcacgcaatacagcaccggacaggtcagcgtggaaattgaatgggagctgcagaaggaaaacagcaagcgctggaaccccgagatccagtacacctccaactactacaaatctacaagtgtggactttgctgttaatacagaaggcgtgtactctgaaccccgccccattggcacccgttacctcacccgtaatctg

SEQ ID NO: 488 - protein, 738 aa, synthetic construct
  source 1..738: note = Description of Artificial Sequence: Synthetic polypeptide
MAADGYLPDWLEDNLSEGIREWWALKPGAPKPKANQQKQDDGRGLVLPGYKYLGPFNGLDKGEPVNAADAAALEHDKAYDQQLQAGDNPYLRYNHADAEFQERLQEDTSFGGNLGRAVFQAKKRVLEPLGLVEEGAKTAPGKKRPVEPSPQRSPDSSTGIGKKGQQPARKRLNFGQTGDSESVPDPQPLGEPPAAPSGVGPNTMAAGGGAPMADNNEGADGVGSSSGNWHCDSTWLGDRVITTSTRTWALPTYNNHLYKQISNGTSGGATNDNTYFGYSTPWGYFDFNRFHCHFSPRDWQRLINNNWGFRPKRLSFKLFNIQVKEVTQNEGTKTIANNLTSTIQVFTDSEYQLPYVLGSAHQGCLPPFPADVFMIPQYGYLTLNNGSQAVGRSSFYCLEYFPSQMLRTGNNFQFTYTFEDVPFHSSYAHSQSLDRLMNPLIDQYLYYLSRTQTTGGTANTQTLGFSQGGPNTMANQAKNWLPGPCYRQQRVSTTTGQNNNSNFAWTAGTKYHLNGRNSLANPGIAMATHKDDEERFFPSNGILIFGKQNAARDNADYSDVMLTSEEEIKTTNPVATEEYGIVADNLSFSRAVLCDGTVNSQGALPGMVWQNRDVYLQGPIWAKIPHTDGNFHPSPLMGGFGLKHPPPQILIKNTPVPADPPTTFNQSKLNSFITQYSTGQVSVEIEWELQKENSKRWNPEIQYTSNYYKSTSVDFAVNTEGVYSEPRPIGTRYLTRNL

SEQ ID NO: 489 - DNA, 4385 bp, unidentified
  source 1..4385: mol_type = unassigned DNA; note = Adeno-associated virus 9
cagagagggagtggccaactccatcactaggggtaatcgcgaagcgcctcccacgctgccgcgtcagcgctgacgtagattacgtcataggggagtggtcctgtattagctgtcacgtgagtgcttttgcgacattttgcgacaccacatggccatttgaggtatatatggccgagtgagcgagcaggatctccattttgaccgcgaaatttgaacgagcagcagccatgccgggcttctacgagattgtgatcaaggtgccgagcgacctggacgagcacctgccgggcatttctgactcttttgtgaactgggtggccgagaaggaatgggagctgcccccggattctgacatggatcggaatctgatcgagcaggcacccctgaccgtggccgagaagctgcagcgcgacttcctggtccaatggcgccgcgtgagtaaggccccggaggccctcttctttgttcagttcgagaagggcgagagctactttcacctgcacgttctggtcgagaccacgggggtcaagtccatggtgctaggccgcttcctgagtcagattcgggagaagctggtccagaccatctaccgcgggatcgagccgaccctgcccaactggttcgcggtgaccaagacgcgtaatggcgccggcggggggaacaaggtggtggacgagtgctacatccccaactacctcctgcccaagactcagcccgagctgcagtgggcgtggactaacatggaggagtatataagcgcgtgcttgaacctggccgagcgcaaacggctcgtggcgcagcacctgacccacgtcagccagacgcaggagcagaacaaggagaatctgaaccccaattctgacgcgcccgtgatcaggtcaaaaacctccgcgcgctacatggagctggtcgggtggctggtggaccggggcatcacctccgagaagcagtggatccaggaggaccaggcctcgtacatctccttcaacgccgcctccaactcgcggtcccagatcaaggccgcgctggacaatgccggcaagatcatggcgctgaccaaatccgcgcccgactacctggtaggcccttcacttccggtggacattacgcagaaccgcatctaccgcatcctgcagctcaacggctacgaccctgcctacgccggctccgtctttctcggctgggcacaaaagaagttcgggaaacgcaacaccatctggctgtttgggccggccaccacgggaaagaccaacatcgcagaagccattgcccacgccgtgcccttctacggctgcgtcaactggaccaatgagaactttcccttcaacgattgcgtcgacaagatggtgatctggtgggaggagggcaagatgacggccaaggtcgtggagtccgccaaggccattctcggcggcagcaaggtgcgcgtggaccaaaagtgcaagtcgtccgcccagatcgaccccactcccgtgatcgtcacctccaacaccaacatgtgcgccgtgattgacgggaacagcaccaccttcgagcaccagcagcctctccaggaccggatgtttaagttcgaactcacccgccgtctggagcacgactttggcaaggtgacaaagcaggaagtcaaagagttcttccgctgggccagtgatcacgtgaccgaggtggcgcatgagttttacgtcagaaagggcggagccagcaaaagacccgcccccgatgacgcggataaaagcgagcccaagcgggcctgcccctcagtcgcggatccatcgacgtcagacgcggaaggagctccggtggactttgccgacaggtaccaaaacaaatgttctcgtcacgcgggcatgcttcagatgctgcttccctgcaaaacgtgcgagagaatgaatcagaatttcaacatttgcttcacacacggggtcagagactgctcagagtgtttccccggcgtgtcagaatctcaaccggtcgtcagaaagaggacgtatcggaaactctgtgcgattcatcatctgctggggcgggctcccgagattgcttgctcggcctgcgatctggtcaacgtggacctggatgactgtgtttctgagcaataaatgacttaaaccaggtatggctgccgatggttatcttccagattggctcgaggacaacctctctgagggcattcgcgagtggtgggcgctgaaacctggagccccgaagcccaaagccaaccagcaaaagcaggacgacggccggggtctggtgcttcctggctacaagtacctcggacccttcaacggactcgacaagggggagcccgtcaacgcggcggacgcagcggccctcgagcacggcaaggcctacgaccagcagctgcaggcgggtgacaatccgtacctgcggtataaccacgccgacgccgagtttcaggagcgtctgcaagaagatacgtcttttgggggcaacctcgggcgagcagtcttccaggccaagaagcgggttctcgaacctctcggtctggttgaggaaggcgctaagacggctcctggaaagaagagaccggtagagccatcaccccagcgttctccagactcctctacgggcatcggcaagaaaggccaacagcccgccagaaaaagactcaattttggtcagactggcgactcagagtcagttccagaccctcaacctctcggagaacctccagcagcgccctctggtgtgggacctaatacaatggctgcaggcggtggcgcaccaatggcagacaataacgaaggcgccgacggagtgggtaattcctcgggaaattggcattgcgattccacatggctgggggacagagtcatcaccaccagcacccgaacctgggcattgcccacctacaacaaccacctctacaagcaaatctccaatggaacatcgggaggaagcaccaacgacaacacctactttggctacagcaccccctgggggtattttgacttcaacagattccactgccacttctcaccacgtgactggcagcgactcatcaacaacaactggggattccggccaaagagactcaacttcaagctgttcaacatccaggtcaaggaggttacgacgaacgaaggcaccaagaccatcgccaataaccttaccagcaccgtccaggtctttacggactcggagtaccagctaccgtacgtcctaggctctgcccaccaaggatgcctgccaccgtttcctgcagacgtcttcatggttcctcagtacggctacctgacgctcaacaatggaagtcaagcgttaggacgttcttctttctactgtctggaatacttcccttctcagatgctgagaaccggcaacaactttcagttcagctacactttcgaggacgtgcctttccacagcagctacgcacacagccagagtctagatcgactgatgaaccccctcatcgaccagtacctatactacctggtcagaacacagacaactggaactgggggaactcaaactttggcattcagccaagcaggccctagctcaatggccaatcaggctagaaactgggtacccgggccttgctaccgtcagcagcgcgtctccacaaccaccaaccaaaataacaacagcaactttgcgtggacgggagctgctaaattcaagctgaacgggagagactcgctaatgaatcctggcgtggctatggcatcgcacaaagacgacgaggaccgcttctttccatcaagtggcgttctcatatttggcaagcaaggagccgggaacgatggagtcgactacagccaggtgctgattacagatgaggaagaaattaaagccaccaaccctgtagccacagaggaatacggagcagtggccatcaacaaccaggccgctaacacgcaggcgcaaactggacttgtgcataaccagggagttattcctggtatggtctggcagaaccgggacgtgtacctgcagggccctatttgggctaaaatacctcacacagatggcaactttcacccgtctcctctgatgggtggatttggactgaaacacccacctccacagattctaattaaaaatacaccagtgccggcagatcctcctcttaccttcaatcaagccaagctgaactctttcatcacgcagtacagcacgggacaagtcagcgtggaaatcgagtgggagctgcagaaagaaaacagcaagcgctggaatccagagatccagtatacttcaaactactacaaatctacaaatgtggactttgctgtcaataccaaaggtgtttactctgagcctcgccccattggtactcgttacctcacccgtaatttgtaattgcctgttaatcaataaaccggttaattcgtttcagttgaactttggtctctgcg

SEQ ID NO: 490 - DNA, 4382 bp, unidentified
  source 1..4382: mol_type = unassigned DNA; note = Adeno-associated virus 9
cagagagggagtggccaactccatcactaggggtaatcgcgaagcgcctcccacgctgccgcgtcagcgctgacgtagattacgtcataggggagtggtcctgtattagctgtcacgtgagtgcttttgcgacattttgcgacaccacatggccatttgaggtatatatggccgagtgagcgagcaggatctccattttgaccgcgaaatttgaacgagcagcagccatgccgggcttctacgagattgtgatcaaggtgccgagcgacctggacgagcacctgccgggcatttctgactcttttgtgaactgggtggccgagaaggaatgggagctgcccccggattctgacatggatcggaatctgatcgagcaggcacccctgaccgtggccgagaagctgtagcgcgacttcctggtccaatggcgccgcgtgagtaaggccccggaggccctcttctttgttcagttcgagaagggcgagagctactttcacctgcacgttctggtcgagaccacgggggtcaagtccatggtgctaggccgcttcctgagtcagattcgggagaagctggtccagaccatctaccgcgggatcgagccgaccctgcccaactggttcgcggtgaccaagacgcgtaatggcgccggcggggggaacaaggtggtggacgagtgctacatccccaactacctcctgcccaagactcagcccgagctgcagtgggcgtggactaacatggaggagtatataagcgcgtgcttgaacctggccgagcgcaaacggctcgtggcgcagcacctgacccacgtcagccagacgcaggagcagaacaaggagaatctgaaccccaattctgacgcgcccgtgatcaggtcaaaaacctccgcgcgctacatggagctggtcgggtggctggtggaccggggcatcacctccgagaagcagtggatccaggaggaccaggcctcgtacatctccttcaacgccgcctccaactcgcggtcccagatcaaggccgcgctggacaatgccggcaagatcatggcgctgaccaaatccgcgcccgactacctggtaggcccttcacttccggtggacattacgcagaaccgcatctaccgcatcctgcagctcaacggctacgaccctgcctacgccggctccgtctttctcggctgggcacaaaagaagttcgggaaacgcaacaccatctggctgtttgggccggccaccacgggaaagaccaacatcgcagaagccattgcccacgccgtgcccttctacggctgcgtcaactggaccaatgagaactttcccttcaacgattgcgtcgacaagatggtgatctggtgggaggagggcaagatgacggccaaggtcgtggagtccgccaaggccattctcggcggcagcaaggtgcgcgtggaccaaaagtgcaagtcgtccgcccagatcgaccccactcccgtgatcgtcacctccaacaccaacatgtgcgccgtgattgacgggaacagcaccaccttcgagcaccagcagcctctccaggaccggatgtttaagttcgaactcacccgccgtctggagcacgactttggcaaggtgacaaagcaggaagtcaaagagttcttccgctgggccagtgatcacgtgaccgaggtggcgcatgagttttacgtcagaaagggcggagccagcaaaagacccgcccccgatgacgcggataaaagcgagcccaagcgggcctgcccctcagtcgcggatccatcgacgtcagacgcggaaggagctccggtggactttgccgacaggtaccaaaacaaatgttctcgtcacgcgggcatgcttcagatgctgcttccctgcaaaacgtgcgagagaatgaatcagaatttcaacatttgcttcacacacggggtcagagactgctcagagtgtttccccggcgtgtcagaatctcaaccggtcgtcagaaagaggacgtatcggaaactctgtgcgattcatcatctgctggggcgggctcccgagattgcttgctcggcctgcgatctggtcaacgtggacctggatgactgtgtttctgagcaataaatgacttaaaccaggtatggctgccgatggttatcttccagattggctcgaggacaacctctctgagggcattcgcgagtggtgggacctgaaacctggagccccgaaacccaaagccaaccagcaaaagcaggacgacggccggggtctggtgcttcctggctacaagtacctcggacccttcaacggactcgacaagggggagcccgtcaacgcggcggacgcagcggccctcgagcacgacaaggcctacgaccagcagctcaaagcgggtgacaatccgtacctgcggtataaccacgccgacgccgagtttcaggagcgtctgcaagaagatacgtcttttgggggcaacctcgggcgagcagtcttccaggccaagaagcgggttctcgaacctctcggtctggttgaggaaggcgctaagacggctcctggaaagaagagaccggtagagcagtcaccccaagaaccagactcatcctcgggcatcggcaaatcaggccagcagcccgctaaaaagagactcaattttggtcagactggcgactcagagtcagtccccgacccacaacctctcggagaacctccagaagccccctcaggtctgggacctaatacaatggcttcaggcggtggcgctccaatggcagacaataacgaaggcgccgacggagtgggtaattcctcgggaaattggcattgcgattccacatggctgggggacagagtcatcaccaccagcacccgaacctgggcattgcccacctacaacaaccacctctacaagcaaatctccaatggaacatcgggaggaagcaccaacgacaacacctactttggctacagcaccccctgggggtattttgacttcaacagattccactgccacttctcaccacgtgactggcagcgactcatcaacaacaactggggattccggccaaagagactcaacttcaagctgttcaacatccaggtcaaggaggttacgacgaacgaaggcaccaagaccatcgccaataaccttaccagcaccgtccaggtctttacggactcggagtaccagctaccgtacgtcctaggctctgcccaccaaggatgcctgccaccgtttcctgcagacgtcttcatggttcctcagtacggctacctgacgctcaacaatggaagtcaagcgttaggacgttcttctttctactgtctggaatacttcccttctcagatgctgagaaccggcaacaactttcagttcagctacactttcgaggacgtgcctttccacagcagctacgcacacagccagagtctagatcgactgatgaaccccctcatcgaccagtacctatactacctggtcagaacacagacaactggaactgggggaactcaaactttggcattcagccaagcaggccctagctcaatggccaatcaggctagaaactgggtacccgggccttgctaccgtcagcagcgcgtctccacaaccaccaaccaaaataacaacagcaactttgcgtggacgggagctgctaaattcaagctgaacgggagagactcgctaatgaatcctggcgtggctatggcatcgcacaaagacgacgaggaccgcttctttccatcaagtggcgttctcatatttggcaagcaaggagccgggaacgatggagtcgactacagccaggtgctgattacagatgaggaagaaattaaagccaccaaccctgtagccacagaggaatacggagcagtggccatcaacaaccaggccgctaacacgcaggcgcaaactggacttgtgcataaccagggagttattcctggtatggtctggcagaaccgggacgtgtacctgcagggccctatttgggctaaaatacctcacacagatggcaactttcacccgtctcctctgatgggtggatttggactgaaacacccacctccacagattctaattaaaaatacaccagtgccggcagatcctcctcttaccttcaatcaagccaagctgaactctttcatcacgcagtacagcacgggacaagtcagcgtggaaatcgagtgggagctgcagaaagaaaacagcaagcgctggaatccagagatccagtatacttcaaactactacaaatctacaaatgtggactttgctgtcaataccgaaggtgtttactctgagcctcgccccattggtactcgttacctcacccgtaatttgtaattgcctgttaatcaataaaccggttaattcgtttcagttgaactttggtctctgcg

SEQ ID NO: 491 - protein, 736 aa, unidentified
  source 1..736: note = Adeno-associated virus 9
MAADGYLPDWLEDNLSEGIREWWALKPGAPQPKANQQHQDNARGLVLPGYKYLGPGNGLDKGEPVNAADAAALEHDKAYDQQLKAGDNPYLKYNHADAEFQERLKEDTSFGGNLGRAVFQAKKRLLEPLGLVEEAAKTAPGKKRPVEQSPQEPDSSAGIGKSGAQPAKKRLNFGQTGDTESVPDPQPIGEPPAAPSGVGSLTMASGGGAPVADNNEGADGVGSSSGNWHCDSQWLGDRVITTSTRTWALPTYNNHLYKQISNSTSGGSSNDNAYFGYSTPWGYFDFNRFHCHFSPRDWQRLINNNWGFRPKRLNFKLFNIQVKEVTDNNGVKTIANNLTSTVQVFTDSDYQLPYVLGSAHEGCLPPFPADVFMIPQYGYLTLNDGSQAVGRSSFYCLEYFPSQMLRTGNNFQFSYEFENVPFHSSYAHSQSLDRLMNPLIDQYLYYLSKTINGSGQNQQTLKFSVAGPSNMAVQGRNYIPGPSYRQQRVSTTVTQNNNSEFAWPGASSWALNGRNSLMNPGPAMASHKEGEDRFFPLSGSLIFGKQGTGRDNVDADKVMITNEEEIKTTNPVATESYGQVATNHQSAQAQAQTGWVQNQGILPGMVWQDRDVYLQGPIWAKIPHTDGNFHPSPLMGGFGMKHPPPQILIKNTPVPADPPTAFNKDKLNSFITQYSTGQVSVEIEWELQKENSKRWNPEIQYTSNYYKSNNVEFAVNTEGVYSEPRPIGTRYLTRNL

SEQ ID NO: 492 - protein, 736 aa, unidentified
  source 1..736: note = Adeno-associated virus 9
MAADGYLPDWLEDNLSEGIREWWDLKPGAPKPKANQQKQDDGRGLVLPGYKYLGPFNGLDKGEPVNAADAAALEHDKAYDQQLKAGDNPYLRYNHADAEFQERLQEDTSFGGNLGRAVFQAKKRVLEPLGLVEEGAKTAPGKKRPVEQSPQEPDSSSGIGKSGQQPAKKRLNFGQTGDSESVPDPQPLGEPPEAPSGLGPNTMASGGGAPMADNNEGADGVGNSSGNWHCDSTWLGDRVITTSTRTWALPTYNNHLYKQISNGTSGGSTNDNTYFGYSTPWGYFDFNRFHCHFSPRDWQRLINNNWGFRPKRLNFKLFNIQVKEVTTNEGTKTIANNLTSTVQVFTDSEYQLPYVLGSAHQGCLPPFPADVFMVPQYGYLTLNNGSQALGRSSFYCLEYFPSQMLRTGNNFQFSYTFEDVPFHSSYAHSQSLDRLMNPLIDQYLYYLVRTQTTGTGGTQTLAFSQAGPSSMANQARNWVPGPCYRQQRVSTTTNQNNNSNFAWTGAAKFKLNGRDSLMNPGVAMASHKDDEDRFFPSSGVLIFGKQGAGNDGVDYSQVLITDEEEIKATNPVATEEYGAVAINNQAANTQAQTGLVHNQGVIPGMVWQNRDVYLQGPIWAKIPHTDGNFHPSPLMGGFGLKHPPPQILIKNTPVPADPPLTFNQAKLNSFITQYSTGQVSVEIEWELQKENSKRWNPEIQYTSNYYKSTNVDFAVNTEGVYSEPRPIGTRYLTRNL

SEQ ID NO: 493 - protein, 623 aa, unidentified
  source 1..623: note = Adeno-associated virus 9
MPGFYEIVIKVPSDLDEHLPGISDSFVNWVAEKEWELPPDSDMDRNLIEQAPLTVAEKLQRDFLVQWRRVSKAPEALFFVQFEKGESYFHLHVLVETTGVKSMVLGRFLSQIREKLVQTIYRGIEPTLPNWFAVTKTRNGAGGGNKVVDECYIPNYLLPKTQPELQWAWTNMEEYISACLNLAERKRLVAQHLTHVSQTQEQNKENLNPNSDAPVIRSKTSARYMELVGWLVDRGITSEKQWIQEDQASYISFNAASNSRSQIKAALDNAGKIMALTKSAPDYLVGPSLPVDITQNRIYRILQLNGYDPAYAGSVFLGWAQKKFGKRNTIWLFGPATTGKTNIAEAIAHAVPFYGCVNWTNENFPFNDCVDKMVIWWEEGKMTAKVVESAKAILGGSKVRVDQKCKSSAQIDPTPVIVTSNTNMCAVIDGNSTTFEHQQPLQDRMFKFELTRRLEHDFGKVTKQEVKEFFRWASDHVTEVAHEFYVRKGGASKRPAPDDADKSEPKRACPSVADPSTSDAEGAPVDFADRYQNKCSRHAGMLQMLLPCKTCERMNQNFNICFTHGVRDCSECFPGVSESQPVVRKRTYRKLCAIHHLLGRAPEIACSACDLVNVDLDDCVSEQ

SEQ ID NO: 494 - DNA, 2211 bp, unidentified
  source 1..2211: mol_type = unassigned DNA; note = Adeno-associated virus
atggctgccgatggttatcttccagattggctcgaggacaaccttagtgaaggaattcgcgagtggtgggctttgaaacctggagcccctcaacccaaggcaaatcaacaacatcaagacaacgctcgaggtcttgtgcttccgggttacaaataccttggacccggcaacggactcgacaagggggagccggtcaacgcagcagacgcggcggccctcgagcacgacaaggcctacgaccagcagctcaaggccggagacaacccgtacctcaagtacaaccacgccgacgccgagttccaggagcggctcaaagaagatacgtcttttgggggcaacctcgggcgagcagtcttccaggccaaaaagaggcttcttgaacctcttggtctggttgaggaagcggctaagacggctcctggaaagaagaggcctgtagagcagtctcctcaggaaccggactcctccgcgggtattggcaaatcgggtgcacagcccgctaaaaagagactcaatttcggtcagactggcgacacagagtcagtcccagaccctcaaccaatcggagaacctcccgcagccccctcaggtgtgggatctcttacaatggcttcaggtggtggcgcaccagtggcagacaataacgaaggtgccgatggagtgggtagttcctcgggaaattggcattgcgattcccaatggctgggggacagagtcatcaccaccagcacccgaacctgggccctgcccacctacaacaatcacctctacaagcaaatctccaacagcacatctggaggatcttcaaatgacaacgcctacttcggctacagcaccccctgggggtattttgacttcaacagattccactgccacttctcaccacgtgactggcagcgactcatcaacaacaactggggattccggcctaagcgactcaacttcaagctcttcaacattcaggtcaaagaggttacggacaacaatggagtcaagaccatcgccaataaccttaccagcacggtccaggtcttcacggactcagactatcagctcccgtacgtgctcgggtcggctcacgagggctgcctcccgccgttcccagcggacgttttcatgattcctcagtacgggtatctgacgcttaatgatggaagccaggccgtgggtcgttcgtccttttactgcctggaatatttcccgtcgcaaatgctaagaacgggtaacaacttccagttcagctacgagtttgagaacgtacctttccatagcagctacgctcacagccaaagcctggaccgactaatgaatccactcatcgaccaatacttgtactatctctcaaagactattaacggttctggacagaatcaacaaacgctaaaattcagtgtggccggacccagcaacatggctgtccagggaagaaactacatacctggacccagctaccgacaacaacgtgtctcaaccactgtgactcaaaacaacaacagcgaatttgcttggcctggagcttcttcttgggctctcaatggacgtaatagcttgatgaatcctggacctgctatggccagccacaaagaaggagaggaccgtttctttcctttgtctggatctttaatttttggcaaacaaggaactggaagagacaacgtggatgcggacaaagtcatgataaccaacgaagaagaaattaaaactactaacccggtagcaacggagtcctatggacaagtggccacaaaccaccagagtgcccaagcacaggcgcagaccggctgggttcaaaaccaaggaatacttccgggtatggtttggcaggacagagatgtgtacctgcaaggacccatttgggccaaaattcctcacacggacggcaactttcacccttctccgctgatgggagggtttggaatgaagcacccgcctcctcagatcctcatcaaaaacacacctgtacctgcggatcctccaacggccttcaacaaggacaagctgaactctttcatcacccagtattctactggccaagtcagcgtggagatcgagtgggagctgcagaaggaaaacagcaagcgctggaacccggagatccagtacacttccaactattacaagtctaataatgttgaatttgctgttaatactgaaggtgtatatagtgaaccccgccccattggcaccagatacctgactcgtaatctgtaa

SEQ ID NO: 495 - protein, 736 aa, unidentified; identical to SEQ ID NO: 491
  source 1..736: note = Adeno-associated virus

SEQ ID NO: 496 - DNA, 2460 bp, unidentified
  source 1..2460: mol_type = unassigned DNA; note = Adeno-associated virus
ggtaattcctccggaaattggcattgcgattccacatggctgggcgaccgagtcattaccaccagcacccggacttgggccctgcccacctacaacaaccacctctacaagcaaatctccagccaatcgggtgccaccaacgacaaccactacttcggctacagcaccccttgggggtattttgatttcaacagattccactgccatttctcaccacgtgactggcagcgactcatcaacaacaactggggattcatggctgccgatggttatcttccagattggctcgaggacactctctctgaaggaatcagacagtggtggaagctcaaacctggcccaccaccgccgaaacctaaccaacaacaccgggacgacagtaggggtcttgtgcttcctgggtacaagtacctcggacccttcaacggactcgacaaaggagagccggtcaacgaggcagacgccgcggccctcgagcacgacaaagcctacgaccaccagctcaagcaaggggacaacccgtacctcaaatacaaccacgcggacgctgaatttcaggagcgtcttcaagaagatacgtctttcgggggcaacctcgggcgagcagtcttccaggccaaaaagagggtactcgagcctcttggtctggttgaggaagctgttaagacggctcctggaaaaaagagacctatagagcagtctcctgcagaaccggactcttcctcgggcatcggcaaatcaggccagcagcccgctaagaaaagactcaattttggtcagactggcgacacagagtcagtcccagaccctcaaccaatcggagaaccccccgcagccccctctggtgtgggatctaatacaatggcttcaggcggtggggcaccaatggcagacaataacgaaggcgccgacggagtgggtaattcctcgggaaattggcattgcgattccacatggatgggcgacagagttatcaccaccagcacaagaacctgggccctccccacctacaataatcacctctacaagcaaatctccagcgaatcgggagccaccaacgacaaccactacttcggctacagcaccccctgggggtattttgactttaacagattccactgtcacttctcaccacgtgactggcagcgactcatcaacaacaactggggatttagacccaagaaactcaatttcaagctcttcaacatccaagtcaaggaggtcacgcagaatgatggaaccacgaccatcgccaataaccttaccagcacggtgcaggtcttcacagactctgagtaccagctgccctacgtcctcggttcggctcaccagggctgccttccgccgttcccagcagacgtcttcatgattcctcagtacggctacttgactctgaacaatggcagccaagcggtaggacgttcttcattctactgtctagagtattttccctctcagatgctgaggacgggaaacaacttcaccttcagctacacttttgaagacgtgcctttccacagcagctacgcgcacagccagagtctggatcggctgatgaatcctctcattgaccagtacctgtattacctgagcaaaactcagggtacaagtggaacaacgcagcaatcgagactgcagttcagccaagctgggcctagctccatggctcagcaggccaaaaactggctaccgggacccagctaccgacagcagcgaatgtctaagacggctaatgacaacaacaacagtgaatttgcttggactgcagccaccaaatattacctgaatggaagaaattctctggtcaatcccgggcccccaatggccagtcacaaggacgatgaggaaaagtatttccccatgcacggaaatctcatctttggaaaacaaggcacaggaactaccaatgtggacattgaatcagtgcttattacagacgaagaagaaatcagaacaactaatcctgtggctacagaacaatacggacaggttgccaccaaccatcagagtcagaacaccacagcttcctatggaagtgtggacagccagggaatcttacctggaatggtgtggcaggaccgcgatgtctatcttcaaggtcccatttgggccaaaactcctcacacggacggacactttcatccttctccgctcatgggaggctttggactgaaacaccctcctccccagatcctgatcaaaaacacacctgtgccagcgaatcccgcgaccactttcactcctggaaagtttgcttcgttcattacccagtattccaccggacaggtcagcgtggaaatagagtgggagctgcagaaagaaaacagcaaacgctggaacccagaaattcagtacacctccaactacaacaagtcggtgaatgtggagtttaccgtggacgcaaacggtgtttattctgaaccccgccctattggcactcgttaccttacccggaacttg

SEQ ID NO: 497 - DNA, 3123 bp, unidentified
  source 1..3123: mol_type = unassigned DNA; note = Adeno-associated virus
gaattcgccctttctacggctgcgtcaactggaccaatgaaaactttcccttcaacgattgcgtcgacaagatggtgatctggtgggaggagggaaagatgaccgccaaggtcgtggaatctgccaaagccattctgggtggaggcaaggttcgtgtggaccagaaatgcaagtcttcggcccagatcgacccgactccggtgattgtcacctctaacaccaacatgtgcgccgtgattgacggaaactcgaccaccttcgagcaccagcagccgttgcaagaccggatgttcaaatttgaacttacccgccgtttggatcatgactttgggaaggtcaccaagcaggaagtcaaagactttttccggtgggctcaagatcacgtgactgaggtggagcatgagttctacgtcaaaaagggtggagccaagaaaaggcccgcccccgatgatgtatatataaatgagcccaagcgggcgcgcgagtcagttgcgcagccatcgacgtcagacgcggaagcttcgataaactacgcggacaggtaccaaaacaaatgttctcgtcacgtgggcatgaatctgatgctgtttccctgtcgacaatgcgaaagaatgaatcagaattcaaatatctgcttcacacacgggcaaaaagactgtttggaatgctttcccgtgtcagaatctcaacccgtttctgtcgtcagaaaaacgtatcagaaactttgttacattcatcatatcatgggaaaagtaccagacgcctgcactgcctgcgacctggtaaatgtggacttggatgactgtatttctgagcaataaatgacttaaatcaggtatggctgctgacggttatcttccagattggctcgaggacactctctctgaaggaatcagacagtggtggaagctcaaacctggcccaccaccgccgaaacctaaccaacaacaccgggacgacagtaggggtcttgtgcttcctgggtacaagtacctcggacccttcaacggactcgacaaaggagagccggtcaacgaggcagacgccgcggccctcgagcacgacaaagcctacgaccaccagctcaagcaaggggacaacccgtacctcaaatacaaccacgcggacgctgaatttcaggagcgtcttcaagaagatacgtctttcgggggcaacctcgggcgagcagtcttccaggccaaaaagagggtactcgagcctcttggtctggttgaggaagctgttaagacggctcctggaaaaaagagacctatagagcagtctcctgcagaaccggactcttcctcgggcatcggcaaatcaggccagcagcccgctaagaaaagactcaattttggtcagactggcgacacagagtcagtcccaggccctcaaccaatcggagaaccccccgcagccccctctggtgtgggatctaatacaatggcttcaggcggtggggcaccaatggcagacaataacgaaggcgccgacggagtgggtaattcctcgggaaattggcattgcgattccacatggatgggcgacagagttatcaccaccagcacaagaacctgggccctccccacctacaataatcacctctacaagcaaatctccagcgaatcgggagccaccaacgacaaccactacttcggctacagcaccccctgggggtattttgactttaacagattccactgtcacttctcaccacgtgactggcagcgactcatcaacaacaactggggatttagacccaagaaactcaatttcaagctcttcaacatccaagtcaaggaggtcacgcagaatgatggaaccacgaccatcgccaataaccttaccagcgcggtgcaggtcttcacagactctgagtaccagctgccctacgtcctcggttcggctcaccagggctgccttccgccgttcccagcagacgtcttcatgattcctcagtacggctacttgactctgaacaatggcagccaagcggtaggacgttcttcattctactgtctagagtattttccctctcagatgctgaggacgggaaacaacttcaccttcagctacacttttgaagacgtgcctttccacagcagctacgcgcacagccagagtctggatcggctgatgaatcctctcattgaccagtacctgtattacctgagcaaaactcagggtacaagtggaacaacgcagcaatcgagactgcagttcagccaagctgggcctagctccatggctcagcaggccaaaaactggctaccgggacccagctaccgacagcagcgaatgtctaagacggctaatgacaacaacaacagtgaatttgcttggactgcagccaccaaatattacctgaatggaagaaattctctggtcaatcccgggcccccagtggccagtcacaaggacgatgaggaaaagtatttccccatgcacggaaatctcatctttggaaaacaaggcacaggaactaccaatgtggacattgaatcagtgcttattacagacgaagaagaaatcagaacaactaatcctgtggctacagaacaatacggacaggttgccaccaaccatcagagtcagaacaccacagcttcctatggaagtgtggacagccagggaatcttacctggaatggtgtggcaggaccgcgatgtctatcttcaaggtcccatttgggccaaaactcctcacacggacggacactttcatccttctccgctcatgggaggctttggactgaaacaccctcctccccagatcctgatcaaaaacacacctgtgccagcgaatcccgcgaccactttcactcctggaaagtttgcttcgttcattacccagtattccacctgacaggtcagcgtggaaatagagtgggagctgcagaaagaaaacagcaaacgctggaacccagaaattcagtacacctccaactacaacaagtcggtgaatgtggagtttaccgtggacgcaaacggtgtttattctgaaccccgccctattggcactcgttaccttacccggaacttgtaatttcctgttaatgaataagccgatttatgcgtttcagttgaactttggtctctgcgaagggcgaattcgtttaaacct

SEQ ID NO: 498 - protein, 735 aa, unidentified
  source 1..735: note = Adeno-associated virus
MAADGYLPDWLEDTLSEGIRQWWKLKPGPPPPKPNQQHRDDSRGLVLPGYKYLGPFNGLDKGEPVNEADAAALEHDKAYDHQLKQGDNPYLKYNHADAEFQERLQEDTSFGGNLGRAVFQAKKRVLEPLGLVEEAVKTAPGKKRPIEQSPAEPDSSSGIGKSGQQPAKKRLNFGQTGDTESVPGPQPIGEPPAAPSGVGSNTMASGGGAPMADNNEGADGVGNSSGNWHCDSTWMGDRVITTSTRTWALPTYNNHLYKQISSESGATNDNHYFGYSTPWGYFDFNRFHCHFSPRDWQRLINNNWGFRPKKLNFKLFNIQVKEVTQNDGTTTIANNLTSAVQVFTDSEYQLPYVLGSAHQGCLPPFPADVFMIPQYGYLTLNNGSQAVGRSSFYCLEYFPSQMLRTGNNFTFSYTFEDVPFHSSYAHSQSLDRLMNPLIDQYLYYLSKTQGTSGTTQQSRLQFSQAGPSSMAQQAKNWLPGPSYRQQRMSKTANDNNNSEFAWTAATKYYLNGRNSLVNPGPPVASHKDDEEKYFPMHGNLIFGKQGTGTTNVDIESVLITDEEEIRTTNPVATEQYGQVATNHQSQNTTASYGSVDSQGILPGMVWQDRDVYLQGPIWAKTPHTDGHFHPSPLMGGFGLKHPPPQILIKNTPVPANPATTFTPGKFASFITQYSTGQVSVEIEWELQKENSKRWNPEIQYTSNYNKSVNVEFTVDANGVYSEPRPIGTRYLTRNL

SEQ ID NO: 499 - DNA, 3123 bp, unidentified
  source 1..3123: mol_type = unassigned DNA; note = Adeno-associated virus
gaattcgccctttctacggctgcgtcaactggaccaatgaaaactttcccttcaacgattgcgtcgacaagatggtgatctggtgggaggagggaaagatgaccgccaaggtcgtggaatctgccaaagccattctgggtggaagcaaggttcgtgtggaccagaaatgcaagtcttcggcccagatcgacccgactccggtgattgtcacctctaacaccaacatgtgcgccgtgattgacggaaactcgaccaccttcgagcaccagcagccgttgcaagaccggatgttcaaatttgaacttacccgccgtttggatcatgactttgggaaggtcaccaagcaggaagtcaaagactttttccggtgggctcaagatcacgtgactgaggtggagcatgagttctacgtcaaaaagggtggagccaagaaaaggcccgcccccgatgatgtatatataaatgagcccaagcgggcgcgcgagtcagttgcgcagccatcgacgtcagacgcggaagcttcgataaactacgcgggcaggtaccaaaacaaatgttctcgtcacgtgggcatgaatctgatgctgtttccctgtcgacaatgcgaaagaatgaatcagaattcaaatatctgcttcacacacgggcaaaaagactgtttggaatgctttcccgtgtcagaatctcaacccgtttctgtcgtcagaaaaacgtatcagaaactttgttacattcatcatatcatgggaaaagaaccagacgcctgcactgcctgcgacctggtaaatgtggacttggatgactgtatttctgagcaataaatgacttaaatcaggtatggctgctgacggttatcttccagattggctcgaggacactctctctgaaggaatcagacagtggtggaagctcaaacctggcccaccaccgccgaaacctaaccaacaacaccgggacgacagtaggggtcttgtgcttcctgggtacaagtacctcggacccttcaacggactcgacaaaggagagccggtcaacgaggcagacgccgcggccctcgagcacgacaaagcctacgaccaccagctcaagcaaggggacaacccgtacctcaaatacaaccacgcggacgctgaatttcaggagcgtcttcaagaagatacgtctttcgggggcaacctcgggcgagcagtcttccaggccaaaaagagggtactcgagcctcttggtctggttgaggaagctgttaagacggctcctggaaaaaagagacctatagagcagtctcctgcagaaccggactcttcctcgggcatcggcgaatcaggccagcagcccgctaagaaaagactcaattttggtcagactggcgacacagagtcagtcccagaccctcaaccaatcggagaaccccccgcagccccctctggtgtgggatctaatacaatggcttcaggcggtggggcaccaatggcagacgataacgaaggcgccgacggagtgggtaattcctcgggaaattggcattgcgattccacatggatgggcgacagagttatcaccaccagcacaagaacctgggccctccccacctacaataatcacctctacaagcaaatctccagcgaatcgggagccaccaacgacaaccactacttcggctacagcaccccctgggggtattttgactttaacagattccactgtcacttctcaccacgtgactggcagcgactcatcaacaacaactggggatttagacccaagaaactcaatttcaagctcttcaacatccaagtcaaggaggtcacgcagaatgatggaaccacgaccatcgccaataaccttaccagcacggtgcaggtcttcacagactctgagtaccagctgccctacgtcctcggttcggctcaccagggctgccttccgccgttcccagcagacgtcttcatgattcctcagtacggctacttgactctgaacaatggcagccaagcggtaggacgttcttcattctactgtctagagtattttccctctcagatgctgaggacgggaaacaacttcaccttcagctacacttttgaagacgtgcctttccacagcagctacgcgcacagccagagtctggatcggctgatgaatcctctcattgaccagtacctgtattacctgagcaaaactcagggtacaagtggaacaacgcagcaatcgagactgcagttcagccaagctgggcctagctccatggctcagcaggccaaaaactggctaccgggacccagctaccgacagcagcgaatgtctaagacggctaatgacaacaacaacagtgaatttgcttggactgcagccaccaaatattacctgaatggaagaaattctctggtcaatcccgggcccccaatggccagtcacaaggacgatgaggaaaagtatttccccatgcacggaaatctcatctttggaaaacaaggcacaggaactaccaatgtggacattgaatcagtgcttattacagacgaagaagaaatcagaacaactaatcctgtggctacagaacaatacggacaggttgccaccaaccatcagagtcaggacaccacagcttcctatggaagtgtggacagccagggaatcttacctggaatggtgtggcaggaccgcgatgtctatcttcaaggtcccatttgggccaaaactcctcacacggacggacactttcatccttctccgctcatgggaggctttggactgaaacaccctcctccccagatcctgatcaaaaacacacctgtgccagcgaatcccgcgaccactttcactcctggaaagtttgcttcgttcattacccagtattccaccggacaggtcagcgtggaaatagagtgggagctgcagaaagaaaacagcaaacgctggaacccagaaattcagtacacctccaactacaacaagtcggtgaatgtggagtttaccgtggacgcaaacggtgtttattctgaaccccgccctattggcactcgttaccttacccggaacttgtaatttcctgttaatgaataaaccgatttatgcgtttcagttgaactttggtctctgcgaagggcgaattcgcggccgcta

SEQ ID NO: 500 - protein, 735 aa, unidentified
  source 1..735: note = Adeno-associated virus
MAADGYLPDWLEDTLSEGIRQWWKLKPGPPPPKPNQQHRDDSRGLVLPGYKYLGPFNGLDKGEPVNEADAAALEHDKAYDHQLKQGDNPYLKYNHADAEFQERLQEDTSFGGNLGRAVFQAKKRVLEPLGLVEEAVKTAPGKKRPIEQSPAEPDSSSGIGESGQQPAKKRLNFGQTGDTESVPDPQPIGEPPAAPSGVGSNTMASGGGAPMADDNEGADGVGNSSGNWHCDSTWMGDRVITTSTRTWALPTYNNHLYKQISSESGATNDNHYFGYSTPWGYFDFNRFHCHFSPRDWQRLINNNWGFRPKKLNFKLFNIQVKEVTQNDGTTTIANNLTSTVQVFTDSEYQLPYVLGSAHQGCLPPFPADVFMIPQYGYLTLNNGSQAVGRSSFYCLEYFPSQMLRTGNNFTFSYTFEDVPFHSSYAHSQSLDRLMNPLIDQYLYYLSKTQGTSGTTQQSRLQFSQAGPSSMAQQAKNWLPGPSYRQQRMSKTANDNNNSEFAWTAATKYYLNGRNSLVNPGPPMASHKDDEEKYFPMHGNLIFGKQGTGTTNVDIESVLITDEEEIRTTNPVATEQYGQVATNHQSQDTTASYGSVDSQGILPGMVWQDRDVYLQGPIWAKTPHTDGHFHPSPLMGGFGLKHPPPQILIKNTPVPANPATTFTPGKFASFITQYSTGQVSVEIEWELQKENSKRWNPEIQYTSNYNKSVNVEFTVDANGVYSEPRPIGTRYLTRNL

SEQ ID NO: 501 - DNA, 3113 bp, unidentified
  source 1..3113: mol_type = unassigned DNA; note = Adeno-associated virus
gaattcgccctttctacggctgcgtcaactggaccaatgaaaactttcccttcaacgattgcgtcgacaagatggtgatctggtgggaggagggaaagatgaccgccaaggtcgtggaatctgccaaagccattctgggtggaagcaaggttcgtgtggaccagaaatgcaagtcttcggcccagatcgacccgactccggtgattgtcacctctaacaccaacatgtgcgccgtgattgacggaaactcgaccaccttcgagcaccagcagccgttgcaagaccggatgttcaaatttgaacttacccgccgtttggatcatgactttgggaaggtcaccaagcaggaagtcaaagactttttccggtgggctcaagatcacgtgactgaggtggagcatgagttctacgtcaaaaagggtggagccaagaaaaggcccgcccccgatgatgtatatataaatgagcccaagcgggcgcgcgagtcagttgcgcagccatcgacgtcagacgcggaagcttcgataaactacgcggacaggtaccaaaacaaatgttctcgtcacgtgggcatgaatctgatgctgtttccctgtcgacaatgcgaaagaatgaatcagaattcaaatatctgcttcacacacgggcaaaaagactgtttggaatgctttcccgtgtcagaatctcaacccgttcctgtcgtcagaaaaacgtatcagaaactttgttacattcatcatatcatgggaaaagtaccagacgcctgcactgcctgcgacctggtaaatgtggacttggatgactgtatttctgagcaataaatgacttaaatcaggtatggctgctgacggttatcttccagattggctcgaggacactctctctgaaggaatcagacagtggtggaagctcaaacctggcccaccaccgccgaaacctaaccaacaacaccgggacgacagtaggggtcttgtgcttcctgggtacaagtacctcggacccttcaacggactcgacaaaggagagccggtcaacgaggcagacgccgcggccctcgagcacgacaaagcctacgaccaccagctcaagcaaggggacaacccgtacctcaaatacaaccacgcggacgctgaatttcaggagcgtcttcaagaagatacgtctttcgggggcaacctcgggcgagcagtcttccaggccaaaaagagggtactcgagcctcttggtctggttgaggaagctgttaagacggctcctggaaaaaagagacctatagagcagtctcctgcagaaccggactcttcctcgggcatcggcaaatcaggccagcagcccgctaagaaaagactcaattttggtcagactggcgacacagagtcagtcccagaccctcaaccaatcggagaaccccccgcagccccctctggtgtgggatctaatacaatggcttcaggcggtggggcaccaatggcagacaataacgaaggcgccgacggagtgggtaattcctcgggaaattggcattgcgattccacatggatgggcgacagagttatcaccaccagcacaagaacctgggccctccccacctacaataatcacctctacaagcaaatctccagcgaatcgggagccaccaacgacaaccactacttcggctacagcaccccctgggggtattttgactttaacagattccactgtcacttctcaccacgtgactggcagcgactcatcaataacaactggggatttagacccaagaaactcaatttcaagctcttcaacatccaagtcaaggaggtcacgcagaatgatggaaccacgaccatcgccaataaccttaccagcacggtgcaggtcttcacagactctgagtaccagctgccctacgtcctcggttcggctcaccagggctgccttccgccgttcccagcagacgtcttcatgattcctcagtacggctacttgactctgaacaatggcagccaagcggtaggacgttcttcattctactgtctagagtattttccctctcagatgctgaggacgggaaacaacttcaccttcagctacacttttgaagacgtgcctttccacagcagctacgcgcacagccagagtctggatcggctgatgaatcctctcattgaccagtacctgtattacctgagcaaaactcagggtacaagtggaacaacgcagcaatcgagactgcagttcaaccaagctgggcctagctccatggctcagcaggccaaaaactggctaccgggacccagctaccgacagcagcgaatgtctaagacggctaatgacaacaacaacagtgaatttgcttggactgcagccaccaaatattacccgaatggaagaaattctctggtcaatcccgggcccccaatggccagtcacaaggacgatgaggaaaagtatttccccatgcacggaaatctcatctttggaaaacaaggcacaggaactaccaatgtggacattgaatcagtgcttattacagacgaagaagaaatcagaacgactaatcctgtggctacagaacaatacggacaggttgccaccaaccgtcagagtcagaacaccacagcttcctatggaagtgtggacagccagggaatcttacctggaatggtgtggcaggaccgcgatgtctatcttcaaggtcccatttgggccaaaactcctcacacggacggacactttcatccttctccgctcatgggaggctttggactgaaacaccctcctccccagatcctgatcaaaaacacacctgtgccagcgaatcccgcgaccactttcactcctggaaagtttgcttcgttcattacccagtattccaccggacaggtcagcgtggaaatagagtgggagctgcagaaagaaaacagcaaacgctggaacccggaaattcagtacacctccaactacaacaagtcggtgaatgtggagtttaccgtggacgcaaacggtgtttattctgaaccccgccctattggcactcgttaccttacccggaacttgtaatttcctgttaatgaataaaccgatttatgcgtttcagttgaactttggtctctgcgaagggcgaattc

SEQ ID NO: 502 - protein, 735 aa, unidentified
  source 1..735: note = Adeno-associated virus
MAADGYLPDWLEDTLSEGIRQWWKLKPGPPPPKPNQQHRDDSRGLVLPGYKYLGPFNGLDKGEPVNEADAAALEHDKAYDHQLKQGDNPYLKYNHADAEFQERLQEDTSFGGNLGRAVFQAKKRVLEPLGLVEEAVKTAPGKKRPIEQSPAEPDSSSGIGKSGQQPAKKRLNFGQTGDTESVPDPQPIGEPPAAPSGVGSNTMASGGGAPMADNNEGADGVGNSSGNWHCDSTWMGDRVITTSTRTWALPTYNNHLYKQISSESGATNDNHYFGYSTPWGYFDFNRFHCHFSPRDWQRLINNNWGFRPKKLNFKLFNIQVKEVTQNDGTTTIANNLTSTVQVFTDSEYQLPYVLGSAHQGCLPPFPADVFMIPQYGYLTLNNGSQAVGRSSFYCLEYFPSQMLRTGNNFTFSYTFEDVPFHSSYAHSQSLDRLMNPLIDQYLYYLSKTQGTSGTTQQSRLQFNQAGPSSMAQQAKNWLPGPSYRQQRMSKTANDNNNSEFAWTAATKYYPNGRNSLVNPGPPMASHKDDEEKYFPMHGNLIFGKQGTGTTNVDIESVLITDEEEIRTTNPVATEQYGQVATNRQSQNTTASYGSVDSQGILPGMVWQDRDVYLQGPIWAKTPHTDGHFHPSPLMGGFGLKHPPPQILIKNTPVPANPATTFTPGKFASFITQYSTGQVSVEIEWELQKENSKRWNPEIQYTSNYNKSVNVEFTVDANGVYSEPRPIGTRYLTRNL

SEQ ID NO: 503 - DNA, 3122 bp, unidentified
  source 1..3122: mol_type = unassigned DNA; note = Adeno-associated virus
agcggccgcgaattcgccctttctacggctgcgtcaactggaccaatgaaaactttcccttcaacgattgcgtcgacaagatggtgatctggtgggaggagggaaagatgaccgccaaggtcgtggaatctgccaaagccattctgggtggaagcaaggttcgtgtggaccagaaatgcaggtcttcggcccagatcgacccgactccggtgattgtcacctctaacaccaacatgtgcgccgtgattgacggaaactcgaccaccttcgagcaccagcagccgttgcaagaccggatgttcaaatttgaacttacccgccgtttggatcatgactttgggaaggtcaccaagcaggaagtcaaagactttttccggtgggctcaagatcacgtgactgaggtggagcatgagttctacgtcaaaaagggtggagccaagaaaaggcccgcccccgatgatgtatatataaatgagcccaagcgggcgcgcgagtcagttgcgcagccatcgacgtcagacgcggaagcttcgataaactacgcggacaggtaccaaaacaaatgttctcgtcacgtgggcatgaatctgatgctgtttccctgtcgacaatgcgaaagaatgaatcagaattcaaatatctgcttcacacacgggcaaaaagactgtttggaatgctttcccgtgtcagaatctcaacccgtttctgtcgtcagaaaaacgtatcagaaactttgttacattcatcatatcatgggaaaagtaccagacgcctgcactgcctgcgacctggtaaatgtggacttggatgactgtatttctgagcaataaatgacttaaatcaggtatggctgctgacggttatcttccagattggctcgaggacactctctctgaaggaatcagacagtggtggaagctcaaacctggcccaccaccgccgaaacctaaccaacaacaccgggacgacagtaggggtcttgtgcttcctgggtacaagtacctcggacccttcaacggactcgacaaaggagagccggtcaacgaggcagacgccgcggccctcgagcacgacaaagcctacgaccaccagctcaagcaaggggacaacccgtacctcaaatacaaccacgcggacgctgaatttcaggagcgtcttcaagaagatacgtctttcgggggcaacctcgggcgagcagtcttccaggccaaaaagagggtactcgagcctcttggtctggttgaggaagctgttaagacggctcctggaaaaaagagacctatagagcagtctcctgcagaaccggactcttcctcgggcatcggcaaatcaggccagcagcccgctaagaaaagactcaattttggtcagactggcgacacagagtcagtcccagaccctcaaccaatcggagaaccccccgcagccccctctggtgtgggatctaatacaatggcttcaggcggtggggcaccaatggcagacaataacgaaggcgccgacggagtgggtaattcctcgggaaattggcattgcgattccacatggatgggcgacagagttatcaccaccagcacaagaacctgggccctccccacctacaataatcgcctctacaagcaaatctccagcgaatcgggagccaccaacgacaaccactacttcggctacagcaccccctgggggtattttgactttaacagattccactgtcacttctcaccacgtgactggcagcgactcatcaacaacaactggggatttagacccaagaaactcaatttcaagctcttcaacatccaagtcaaggaggtcacgcagaatgatggaaccacgaccatcgccaataaccttaccagcacggtgcaggtcttcacagactctgagtaccagctgccctacgtcctcggttcggctcaccagggctgccttccgccgttcccagcagacgtcttcatgattcctcagtacggctacttgactctgaacaatggcagccaagcggtaggacgttcttcattctactgtctagagtattttccctctcagatgctgaggacgggaaacaacttcaccttcagctacacttttgaagacgtgcctttccacagcagctacgcgcacagccagagtctggatcggctgatgaatcctctcattgaccagtacctgtattacctgagcaaaactcagggtacaagtggaacaacgcagcaatcgagactgcagttcagccaagctgggcctagctccatggctcagcaggccaaaaactggctaccgggacccagctaccgacagcagcgaatgtctaagacggctaatgacaacaacaacagtgaatttgcttggactgcagccaccaaatattacctgaatggaagaaattctctggtcaatcccgggcccccaatggccagtcacaaggacgatgaggaaaagtatttccccatgcacggaaatctcatctttggaaaacaaggcacaggaactaccaatgtggacattgaatcagtgcttattacagacgaagaagaaatcagaacaactaatcctgtggctacagaacaatacggacaggttgccaccaaccatcagagtcagaacaccacagcttcctatggaagtgtggacagccagggaatcttacctggaatggtgtggcaggaccgcgatgtctatcttcaaggtcccatttgggccaaaactcctcacacggacggacactttcatccttctccgctcatgggaggctttggactgaaacaccctcctccccagatcctgatcaaaaacacacctgtgccagcgaatcccgcgaccactttcactcctggaaagtttgcttcgttcattacccagtattccaccggacaggtcagcgtggaaatagagtgggagctgcagaaagaaaacagcaaacgctggaacccagaaattcagtacacctccaactacaacaagtcggtgaatgtggagtttaccgtggacgcaaacggtgtttattctgaaccccgccctattggcactcgttaccttacccggaacttgtaatttcctgttaatgaataaaccgatttatgcgtttcagttgaactttggtctctgcgaagggcgaattc

SEQ ID NO: 504 - protein, 735 aa, unidentified
  source 1..735: note = Adeno-associated virus
MAADGYLPDWLEDTLSEGIRQWWKLKPGPPPPKPNQQHRDDSRGLVLPGYKYLGPFNGLDKGEPVNEADAAALEHDKAYDHQLKQGDNPYLKYNHADAEFQERLQEDTSFGGNLGRAVFQAKKRVLEPLGLVEEAVKTAPGKKRPIEQSPAEPDSSSGIGKSGQQPAKKRLNFGQTGDTESVPDPQPIGEPPAAPSGVGSNTMASGGGAPMADNNEGADGVGNSSGNWHCDSTWMGDRVITTSTRTWALPTYNNRLYKQISSESGATNDNHYFGYSTPWGYFDFNRFHCHFSPRDWQRLINNNWGFRPKKLNFKLFNIQVKEVTQNDGTTTIANNLTSTVQVFTDSEYQLPYVLGSAHQGCLPPFPADVFMIPQYGYLTLNNGSQAVGRSSFYCLEYFPSQMLRTGNNFTFSYTFEDVPFHSSYAHSQSLDRLMNPLIDQYLYYLSKTQGTSGTTQQSRLQFSQAGPSSMAQQAKNWLPGPSYRQQRMSKTANDNNNSEFAWTAATKYYLNGRNSLVNPGPPMASHKDDEEKYFPMHGNLIFGKQGTGTTNVDIESVLITDEEEIRTTNPVATEQYGQVATNHQSQNTTASYGSVDSQGILPGMVWQDRDVYLQGPIWAKTPHTDGHFHPSPLMGGFGLKHPPPQILIKNTPVPANPATTFTPGKFASFITQYSTGQVSVEIEWELQKENSKRWNPEIQYTSNYNKSVNVEFTVDANGVYSEPRPIGTRYLTRNL

SEQ ID NO: 505 - DNA, 3121 bp, unidentified
  source 1..3121: mol_type = unassigned DNA; note = Adeno-associated virus
gaattcgcccttcgcagagaccaaagttcaactgaaacgaatcaaccggtttattgattaacaagcaattacagattacgggtgaggtaacgggtgccgatggggcgaggctcagaataagtgccatctgtgttaacagcaaagtccacatttgtagatttgtagtagttggaagtgtattgaatctctgggttccagcgtttgctgttttctttctgcagctcccattcaatttccacgctgacctgtccggtgctgtactgcgtgatgaacgacgccagcttagcttgactgaaggtagttggaggatccgcgggaacaggtgtattcttaatcaggatctgaggaggcgggtgtttcagtccaaagccccccatcagcggcgagggatgaaagtttccgtccgtgtgaggaatcttggcccagataggaccctgcaggtacacgtcccggttctgccagaccatgccaggtaaggctccttgactgttgacggcccctacaataggagcggcgttttgctgttgcaggttatcggccaccacgccgtactgttctgtggccactgggttggtggttttaatttcttcctcactggttagcataacgctgctatagtccacgttgccttttccagctccctgtttcccaaacattaagactccgctggacggaaaaaatcgctcttcgtcgtccttgtgggttgccatagcgacaccgggatttaccagagagtctctgccattcagatgatacttggtggcaccggtccaggcaaagttgctgttgttattttgcgacagtgtcgtggagacgcgttgctgccggtagcagggcccgggtagccagtttttggcctgagccgacatgttattaggcccggcctgagaaaatagcaactgctgagttcctgcggtacctcccgtggactgagtccgagacaggtagtacaggtactggtcgatgagggggttcatcagccggtccaggctttggctgtgcgcgtagctgctgtgaaaaggcacgtcctcaaactggtagctgaactcaaagttgttgcccgttctcagcatttgagaaggaaagtactccaggcagtagaaggaggaacggcccacggcctgactgccattgttcagagtcaggtacccgtactgaggaatcatgaagacgtccgccgggaacggaggcaggcagccctggcgcgcagagccgaggacgtacgggagctggtattccgagtccgtaaagacctgaatcgtgctggtaaggttattggcgatggtcttggtgccttcattctgcgtgacctccttgacctggatgttgaagagcttgaagttgagtctcttgggccggaatccccagttgttgttgatgagtcgctgccagtcacgtggtgagaagtggcagtggaatctgttaaagtcaaaatacccccagggggtgctgtagccgaagtaggtgttgtcgttggtgcttcctcccgaagtcccgttggagatttgcttgtagaggtggttgttgtaggtggggagggcccaggttcgggtgctggtggtgatgactctgtcgcccagccatgtggaatcgcaatgccaatttcctgaggaactacccactccgtcggcgccttcgttattgtctgccattggagcgccaccgcctgcagccattgtaccagatcccagaccagaggggcctgcggggggttctccgattggttgagggtcgggcactgactctgagtcgccagtctgcccaaagttgagtctctttttcgcgggctgctggcctttcttgccgatgcccgtagtggagtctggagaacgctggggtgatggctctaccggtctcttctttccaggagccgtcttagcgccttcctcaaccagaccgagaggttcgagaacccgcttcttggcctggaagactgctcgtccgaggttgcccccaaaagacgtatcttcttgcagacgctcctgaaactcggcgtcggcgtggttataccgcaggtacggattgtcacccgctttgagctgctggtcgtaggccttgtcgtgctcgagggccgctgcgtccgccgcgttgacgggctcccccttgtcgagtccgttgaagggtccgaggtacttgtagccaggaagcaccagaccccggccgtcgtcctgcttttgctggttggctttgggcttcggggctccaggtttcagcgcccaccactcgcgaatgccctcagagaggttgtcctcgagccaatctggaagataaccatcggcagccatacctgatctaaatcatttattgttcaaagatgcagtcatccaaatccacattgaccagatcgcaggcagtgcaagcgtctggcacctttcccatgatatgatgaatgtagcacagtttctgatacgcctttttgacgacagaaacgggttgagattctgacacgggaaagcactctaaacagtctttctgtccgtgagtgaagcagatatttgaattctgattcattctctcgcattgtctgcagggaaacagcatcagattcatgcccacgtgacgagaacatttgttttggtacctgtccgcgtagttgatcgaagcttccgcgtctgacgtcgatggctgcgcaactgactcgcgcacccgtttgggctcacttatatctgcgtcactgggggcgggtcttttcttggctccaccctttttgacgtagaattcatgctccacctcaaccacgtgatcctttgcccaccggaaaaagtctttgacttcctgcttggtgaccttcccaaagtcatgatccagacggcgggtgagttcaaatttgaacatccggtcttgcaacggctgctggtgttcgaaggtcgttgagttcccgtcaatcacggcgcacatgttggtgttggaggtgacgatcacgggagtcgggtctatctgggccgaggacttgcatttctggtccacgcgcaccttgcttcctccgagaatggctttggccgactccacgaccttggcggtcatcttcccctcctcccaccagatcaccatcttgtcgacacagtcgttgaagggaaagttctcattggtccagttgacgcagccgtagaagggcgaattc

SEQ ID NO: 506 - protein, 733 aa, unidentified
  source 1..733: note = Adeno-associated virus
MAADGYLPDWLEDNLSEGIREWWDLKPGAPKLKANQQKQDDGRGLVLPGYKYLGPFHGLDKGEPVNAADAAALEHDKAYDQQLKAGDNPYLRYNHADAEFQERLQEDTSFGGNLGRAVFQAKKRVLEPLGLVEEGAKTAPGKKRPLESPQEPDSSSGIGKKGKQPAKKRLNFEEDTGAGDGPPEGSDTSAMSSDIEMRAAPGGNAVDAGQGSDGVGNASGDWHCDSTWSEGKVTTTSTRTWVLPTYNNHLYLRLGTTSNSNTYNGFSTPWGYFDFNRFHCHFSPRDWQRLINNNWGLRPKAMRVKIFNIQVKEVTTSNGETTVANNLTSTVQIFADSSYELPYVMDAGQEGSLPPFPNDVFMVPQYGYCGIVTGENQNQTDRNAFYCLEYFPSQMLRTGNNFEMAYNFEKVPFHSMYAHSQSLDRLMNPLLDQYLWHLQSTTSGETLNQGNAATTFGKIRSGDFAFYRKNWLPGPCVKQQRFSKTASQNYKIPASGGNALLKYDTHYTLNNRWSNIAPGPPMATAGPSDGDFSNAQLIFPGPSVTGNTTTSANNLLFTSEGEIAATNPRDTDMFGQIADNNQNATTAPITGNVTAMGVLPGMVWQNRDIYYQGPIWAKIPHADGHFHPSPLIGGFGLKHPPPQIFIKNTPVPANPATTFTAARVDSFITQYSTGQVAVQIEWEIEKERSKRRNPEVQFTSNYGNQSSMLWAPDTTGKYTEPRVIGSRYLTNHL

SEQ ID NO: 507 - protein, 735 aa, unidentified
  source 1..735: note = Adeno-associated virus
MAADGYLPDWLEDTLSEGIRQWWKLKPGPPPPKPNQQHRDDSRGLVLPGYKYLGPFNGLDKGEPVNEADAAALEHDKAYDHQLKQGDNPYLKYNHADAEFQERLQEDTSFGGNLGRAVFQAKKRVLEPLGLVEEAVKTAPGKKRPIEQSPAEPDSSSGIGKSGQQPAKKRLNFGQTGDTESVPDPQPIGEPPAAPSGVGSNTMASGGGAPMADNNEGADGVGNSSGNWHCDSTWMGDRVITTSTRTWALPTYNNHLYKQISSESGATNDNHYFGYSTPWGYFDFNRFHCHFSPRDWQRLINNNWGFRPKKLNFKLFNIQVKEVTQNDGTTTIANNLTSTVQVFTDSEYQLPYVLGSAHQGCLPPFPADVFMIPQYGYLTLNNGSQAVGRSSFYCLEYFPSQMLRTGNNFTFSYTFEDVPFHSSYAHSQSLDRLMNPLIDQYLYYLSKTQGTSGTTQQSRLQFSQAGPSSMAQQAKNWLPGPSYRQQRMSKTANDNNNSEFAWTAATKYYLNGRNSLVNPGPPMASHKDDEEKYFPMHGNLIFGKQGTGTTNVDIESVLITDEEEIRTTNPVATEQYGQVATNHQSQNTTASYGSVDSQGILPGMVWQDRDVYLQGPIWAKIPHTDGHFHPSPLMGGFGLKHPPPQILIKNTPVPANPATTFTPGKFASFITQYSTGQVSVEIEWELQKENSKRWNPEIQYTSNYNKSVNVEFTVDANGVYSEPRPIGTRYLTRNL

SEQ ID NO: 508 - DNA, 3127 bp, unidentified
  source 1..3127: mol_type = unassigned DNA; note = Adeno-associated virus
gcggccgcgaattcgcccttcgcagagaccaaagttcaactgaaacgaatcaaccggtttattgattaacatgcaattacagattacgggtgaggtaacgagtgccaatagggcgaggctcagagtaaacaccctggctgtcaacggcaaagtccacaccagtctgcttttcaaagttggaggtgtactgaatctccgggtcccagcgcttgctgttttccttctgcagctcccactcgatttccacgctgacttgtccggtgctgtactgtgtgatgaacgaagcaaacttggcaggagtaaacacctccggaggattagcgggaacgggagtgttcttgatcaggatctgaggaggcggatgtttaagtccaaagccgcccatcaaaggagacgggtgaaagttgccatccgtgtgaggaatcttggcccagatgggaccctgcaggtacacgtcccggttctgccagaccatgccaggtaaggctccctggttgttgacaacttgtgtctgggctgcagtattagccgcttgtaagttgctgctgactatcccgtattcttccgtggctacaggattagtaggacgaatttcttcttcatttgtcattaacacattttccaatgtagttttgttagttgctccagtttttccaaaaatcaggactccgctggatgggaaaaagcggtcctcgtcgtccttgtgagttgccatggcgacgccgggattaaccaacgagtttctgccgttcaggtgatatttggtggcaccagtccaagcaaagttgctgttgttgttttgatccagcgttttggagaccctttgttgccggaagcagggtccaggtaaccaattcttggcttgttcggccatagttgaaggcccgccctggtaaaactgcagttcccgattgccagctgtgcctcctgggtcactctgtgttctggccaggtagtacaagtactggtcgatgaggggattcatcagccggtccaggctctggctgtgtgcgtagctgctgtggaaaggcacgtcctcgaagctgtagctgaactcaaagttgttgcccgttctcagcatctgagaggggaagtactccaggcagtagaaggaggaacgtcccacagactgactgccattgttgagagtcaggtagccgtactgaggaatcatgaagacgtccgccgggaacggaggcaggcagccctggtgcgcagagccgaggacgtacggcagctggtattccgagtccgagaatacctgaatcgtgctggtaaggttattagcgatggtcgtaacgccgtcattcgtcgtgacctccttgacctggatgttgaagagcttgaaccgcagcttcttgggccggaatccccagttgttgttgatgagtcgctgccagtcacgtggtgagaagtggcagtggaatctgttaaagtcaaaatacccccagggggtgctgtagccgaagtaggtgttgtcgttggtactacctgcagtttcactggagatttgctcgtagaggtggttgttgtaggtgggcagggcccaggttcgggtgctggtggtaatgactctgtcgcccagccatgtggaatcgcaatgccaatttcctgaggcattacccactccgtcggcaccttcgttattgtctgccattggtgcgccaccgcctgcagccactgtaccagatcccacactagagggcgctgctggaggttctccgagaggttgagggtcggggactgactctgagtcgccagtctgaccgaaattgagtctctttctggcgggctgctggcccttcttgccgatgcccgtggaggagtcgggggaacgctgaggtgacggctctaccggtctcttctttgcaggagccgtcttagcgccttcctcaaccagaccgagaggttcgagaacccgcttcttggcctggaagactgctcgcccgaggttgcccccaaatgacgtatcttcttgcagacgctcctgaaactcggcgtcggcgtggttataccgcaggtacgggttgtcacccgcattgagctgctggtcgtaggccttgtcgtgctcgagggccgctgcgtccgccgcgttgacgggctcccccttgtcgagtccgttgaagggtccgaggtacttgtagccaggaagcaccagaccccggccgttgtcctgcttttgctggttggctttgggtttcggggctccaggtttcaggtcccaccactcgcgaatgccctcagagaggttgtcctcgagccaatctggaagataaccatcggcagccatacctgatttaaatcatttattgttcaaagatgcagtcatccaaatccacattgaccagatcgcaggcagtgcaagcgtctggcacctttcccatgatatgatgaatgtagcacagtttctgatacgcctttttgacgacagaaacgggtttagattctgacacgggaaagcactctaaacagtctttctgtccgtgagtgaagcagatatttgaattctgattcattctctcgcattgtctgcagggaaacagcatcagattcatgcccacgtgacgagaacatttgttttggtacctgtctgcgtagttgatcgaagcttccgcgtctgacgtcgatggctgcgcaactgactcgcgcacccgtttgggctcacttatatctgcgtcactgggggcgggtcttttcttggctccaccctttttgacgtagaattcatgctccacctcaaccacgtaatcctttgcccaccggaaaaagtctttgacttcctgcttggtgaccttcccaaagtcatgatccagacggcgggtgagttcaaatttgaacatccggtcttgcaacggctgctggtgttcgaaggtcgttgagttcccgtcgatcacggcgcacatgttggtgttggagatgacgatcgcgggagtcgggtctatctgggccgaggacttgcatttctggtccacgcgcaccttgcttcctccgagaatggctttggccgactccacgaccttggcggtcatcttcccctcctcccaccagatcaccatcttgtcgacacagtcgttgaagggaaagttctcattggtccagttgacgcagccgtagaaagggcgaattc

SEQ ID NO: 509 - protein, 728 aa, unidentified
  source 1..728: note = Adeno-associated virus
MAADGYLPDWLEDNLSEGIREWWDLKPGAPKPKANQQKQDDGRGLVLPGYKYLRPFNGLDKGEPVNEADAAALEHDKAYDKQLEQGDNPYLKYNHADAEFQERLQEDTSFGGNLGRAVFQAKKRVLEPLGLVEEVAKTAPGKKRPIESPDSSTGIGKKGQQPAKKKLNFGQTGDSESVPDPQPLGEPPAAPSGLGSGTMAAGGGAPMADNNEGADGVGNASGNWHCDSTWLGDRVITTSTRTWALPTYNNHLYKQISSQSGATNDNHFFSYSTPWGYFDFNRFHCHFSPRDWQRLINNNWGFRPRKLRFKLFNIQVKEVTTNDGVTTIANNLTSTIQVFSDSEYQLPYVLGSAHQGCLPPFPADVFMIPQYGYLTLNNGSQSVGRSSFYCLEYFPSQMLRTGNNFEFSYTFEEVPFHSSYVHSQSLDRLMNPLIDQYLYYLARTQSTTGSTRELQFHQAGPNTMAEQSKNWLPGPCYRQQRLSKNIDSNNNSNFAWTGATKYHLNGRNSLTNPGVAMATNKDDEDQFFPINGVLVFGKTGAANKTTLENVLMTSEEEIKTTNPVATEEYGVVSSNLQSSTAGPQTQTVNSQGALPGMVWQNRDVCLQGPIWAKIPHTDGNFHPSPLMGGFGLKHPPPQILIKNTPVPANPPEVFTPAKFASFITQYSTGQVSVEIEWELQKENSKRWNPEIQYTSNYAKSNNVEFAVNNEGVYTEPRPIGTRYLTRNL

SEQ ID NO: 510 - DNA, 3106 bp, unidentified
  source 1..3106: mol_type = unassigned DNA; note = Adeno-associated virus
gcggccgcgaattcgcccttcgcagagaccaaagttcaactgaaacgaatcaaccggtttattgattaacaagtaattacaggttacgggtgaggtaacgggtgccaatggggcgaggctcagtataaaccccttcgttgttgacagcaaattccacattattagacttggcataatttgaggtgtactgaatctctggattccagcgtttgctgttttctttctgcagttcccactcgatctccacgctgacctggccggtgctgtactgcgtgataaatgaggcaaacttggcaggagtaaacacctctggaggattagcaggtaccggggtgtttttgatgagaatttgaggaggcgggtgtttgagtccaaatccgcccatcaggggagacgggtgaaagttgccgtccgtgtgaggaattttggcccagatgggaccctgcaggcacacgtcccggttctgccagaccatgccgggcagagccccctggctgttgacagtctgtgtctggggtccggccgtagacgattgcaggttgctggagaccacaccgtattcttctgtagccacgggattggtggttttgatctcctcctcgctggtcattagcacgttttccagcgttgtcttgttggcagcccccgttttgccaaaaaccagcactccgttgatgggaaagaactggtcctcgtcgtccttgttggtggccatggctacgcccgggttggttaatgaatttctaccattcagatggtatttagtggccccggtccaggcaaagttactgttgttgttgctgtctatgttttttgacagtctctgctgccgataacagggtccgggcagccagttctttgattgctcggccatggtgttgggcccagcctgatggaactgcagctcccttgtggaccccgtagtgctctgggtccgggccaggtagtacaggtactggtcgatgaggggattcatcagccggtctaggctctggctgtgcacatagctgctgtggaaaggcacttcctcaaaggtgtagctgaattcaaagttattgcccgttctcagcatctgagaaggaaagtactccaggcagtagaaggaggaacgtcccacagactgactgccgttgtttagagtcagatatccgtactgaggaatcatgaacacgtccgcagggaacggagggaggcagccctggtgcgcagagccgaggacgtacggcagttggtactccgagtccgagaagacctgaatcgtgctggtaaggttattagcgatggtcgtaacgccgtcgttcgtcgtgacctccttgacctggatgttgaacaacttgaaccgcagctttctgggccggaatccccagttgttgttgatgagtcgctgccagtcacgtggtgagaagtggcagtggaatctgttgaagtcaaaatagccccagggggtgctgtagctgaagaagtggttgtcgttggtagccccgctctgacttgatatctgcttgtagaggtggttgttgtaggtgggcagggcccaggtgcgggtgctggtggtgatgactctgtcgcccagccatgtggaatcgcaatgccaatttccggaggcattacccactccgtcggcgccttcgttattgtctgccattggtgcgccaccgcctgcagccattgtaccagatcccagacctgagggcgcggcgggaggttctccgagaggttgggggtcgggcactgactctgagtcgccagtctgcccaaagttgagcttctttttagcgggctgctggcctttcttgccgatgcccgtggaggagtcgggggattctatgggtctcttctttccaggagccgtcttagcgacttcctcaaccagaccgagaggttcgagaacccgcttcttggcctggaagactgctcgcccgaggttgcccccaaaagacgtatcttcttgaagacgctcctgaaactcggcgtcggcgtggttgtacttgaggtacgggttgtccccctgctcgagctgcttgtcgtaggccttgtcgtgctcgagggccgcggcgtctgcctcgttgaccggctctcccttgtcgagtccgttgaagggtctgaggtacttgtagccaggaagcaccagaccccggccgtcgtcctgcttttgctggttggctttgggtttcggggctccaggtttcaagtcccaccactcgcgaatgccctcagagaggttgtcctcgagccaatctggaagataaccatcggcagccatacctggtttaagtcatttattgctcagaaacacagtcatccaggtccacgttgaccagatcgcaggccgagcaagcaatctcgggagcccgccccagcagatgatgaatggcacagagtttccgatacgtcctctttctgacgaccggttgagattctgacacgccggggaaacattctgaacagtctctggtcccgtgcgtgaagcaaatgttgaaattctgattcactctctcgcatgtcttgcagggaaacagcatctgaagcatgcccgcgtgacgagaacatttgttttggtacctgtcggcaaagtccaccggagctccttccgcgtctgacgtcgatggattcgcgactgaggggcaggcccgcttgggctcgcttttatccgcgtcatcgggggcgggtctcttgttggccccaccctttctgacgtagaacccatgcgccacctcggtcacgtgatcctgcgcccagcggaagaaccttttgacttcctgctttgtcaccttgccaaagttatgctccagacggcgggtgggttcaaatttgaacatccggtcctgcaacggctgctggtgctcgaaggtggcgctgttcccgtcaatcacggcgcacatgttggtgttggaggtgacggtcacgggggtggggtcgatctgggcggacgacttgcacttttggtccacgcgcaccttgctgccgccgagaatggccttggcggactccacgaccttggccgtcatcttgccctcctcccaccagatcaccatcttgtcggcgcaatcgttgaagggaaagttctcattggtccagttgacgcagccgtagaaagggcgaattc

SEQ ID NO: 511 - protein, 728 aa, unidentified
  source 1..728: note = Adeno-associated virus
MAADGYLPDWLEDNLSEGIREWWDLKPGAPKPKANQQKQDDGRGLVLPGYKYLGPFNGLDKGEPVNEADAAALEHDKAYDKQLEQGDNPYLKYNHADAEFQERLQEDTSFGGNLGRAVFQAKKRVLEPLGLVEEGAKTASGKKRPIESPDSSTGIGKKGQQPAKKKLNFGQTGDSESVPDPQPLGEPPAAPSGLGSGTMAAGGGAPMADNNEGADGVGNASGNWHCDSTWLGDRVITTSTRTWALPTYNNHLYKQISSQSGATNDNHFFGYSTPWGYFDFNRFHCHFSPRDWQRLINNNWGFRPRKLRFKLFNIQVKEVTTNDGVTTIANNLTSTIQVFSDSEYQLPYVLGSAHQGCLPPFPADVFMIPQYGYLTLNNGSQSVGRSSFCCLEYFPSQMLRTGNNFEFSYTFEEVPFHSSYAHSQSLDRLMNPLIDQYLYYLARTQSTTGSTRELQFHQAGPNTVAEQSKNWLPGPCYRQQRLSKNIDSNNNSNFAWTGATKYHLNGRNSLTNPGVAMATNKDDEDQFLPINGVLVFGKTGAANKTTLENVLMTSEEEIKTTNPVATEEYGVVSSNLQSSTAGPRTQTVNSQGALPGMVWQNRDVYLQGPIWAEIPHTDGNFHPSPLMGGFGLKHPPPQILIKNTPVPANPPEVFTPAKFASFITQYSTGQVSVEIEWELQKENSKRWNPEIQYTSNYAKSNNVEFAVNNEGVYTEPRPIGTRYLTRNL

SEQ ID NO: 512 - DNA, 3102 bp, unidentified
  source 1..3102: mol_type = unassigned DNA; note = Adeno-associated virus
gcggccgcgaattcgcccttcgcagagaccaaagttcaactgaaacgaatcaaccggtttattgattaacaagtaattacaggttacgggtgaggtaacgggtgccaatggggcgaggctcagtataaaccccttcgttgttgacagcaaattccacattattagacttggcataatttgaggtgtactgaatctctggattccagcgtttgctgttttctttctgcagttcccactcgatctccacgctgacctggccggtgctgtactgcgtgataaatgaggcaaacttggcaggagtaaacacctctggaggattagcaggtaccggggtgtttttgatgagaatttgaggaggcgggtgtttgagtccaaatccgcccatcaggggagacgggtgaaagttgccgtccgtgtgaggaatttcggcccagatgggaccctgcaggtacacgtcccggttctgccagaccatgccgggcagagccccctggctgttgacagtctgtgtccggggtccggccgtagacgattgcaggttgctggagaccacaccgtattcttctgtagccacgggattggtggttttgatctcctcctcgctggtcattagcacgttttccagcgttgtcttgttggcagcccccgttttgccaaaaaccagcactccgttgatgggaaggaactggtcctcgtcgtccttgttggtggccatggctacgcccgggttggttaatgaatttctaccattcagatggtatttagtggccccggtccaggcaaagttactgttgttgttgctgtctatgttttttgacagtctctgctgccgataacagggtccgggcagccagttctttgattgctcggccacggtgttgggcccagcctgatggaactgcagctcccttgtggaccccgtagtgctctgggtccgggccaggtagtacaggtactggtcgatgaggggattcatcagccggtccaggctctggctgtgcgcatagctgctgtggaaaggcacttcctcaaaggtgtagctgaattcaaagttattgcccgttctcagcatctgagaaggaaagtactccaggcagcagaaggaggaacgtcccacagactgactgccgttgtttagagtcagatatccgtactgaggaatcatgaacacgtccgcagggaacggagggaggcagccctggtgcgcagagccgaggacgtacggcagttggtactccgagtccgagaagacctgaatcgtgctggtaaggttattagcgatggtcgtaacgccgtcgttcgtcgtgacctccttgacctggatgttgaacaacttgaaccgcagctttctgggccggaatccccagttgttgttgatgagtcgctgccagtcacgtggtgagaagtggcagtggaatctgttgaagtcaaaatagccccagggggtgctgtagccgaagaagtggttgtcgttggtagccccgctctgacttgatatctgcttgtagaggtggttgttgtaggtgggcagggcccaggtgcgggtgctggtggtgatgactctgtcgcccagccatgtggaatcgcaatgccaatttccggaggcattacccactccgtcggcgccttcgttattgtctgccattggtgcgccaccgcctgcagccattgtaccagatcccagacctgagggcgcggcgggaggttctccgagaggttgggggtcgggcactgactctgagtcgccagtctgcccaaagttgagcttctttttagcgggctgctggcctttcttgccgatgcccgtggaggagtcgggggattctatgggtctcttctttccggaagccgtcttagcgccttcctcaaccagaccgagaggttcgagaacccgcttcttggcctggaagactgctcgcccgaggttgcccccaaaagacgtatcttcttgaagacgctcctgaaactcggcgtcggcgtggttgtacttgaggtacgggttgtccccctgctcgagctgcttgtcgtaggccttgtcgtgctcgagggccgcggcgtctgcctcgttgaccggctctcccttgtcgagtccgttgaagggtccgaggtacttgtagccaggaagcaccagaccccggccgtcgtcctgcttttgctggttggctttgggtttcggggctccaggtttcaagtcccaccactcgcgaatgccctcagagaggttgtcctcgagccaatctggaagataaccatcggcagccatacctggtttaagtcatttattgctcagaaacacagtcatccaggtccacgttgaccagatcgcaggccgagcaagcaatctcgggagcccgccccagcagatgatgaatggcacagagtttccgatacgtcctctttctgacgaccggttgagattctgacacgccggggaaacattctgaacagtctctggtcccgtgcgtgaagcaaatgttgaaattctgattcattctctcgcatgtcttgcagggaaacagcatctgaagcatgcccgcgtgacgagaacatttgttttggtacctgtcggcaaagtccaccggagctccttccgcgtctgacgtcgatggatccgcgactgaggggcaagcccgcttgggctcgcttttatccgcgtcatcgggggcgggtctcttgttggctccaccctttctgacgtagaactcatgcgccacctcggtcacgtgatcctgcgcccagcggaagaactctttgacttcctgctttgtcaccttgccaaagtcatgctccagacggcgggtgagttcaaatttgaacatccggtcttgtaacggctgctggtgctcgaaggtggtgctgttcccgtcaatcacggcgcacatgttggtgttggaagtgacgatcacgggggtgggatcgatctgggcggacgacttgcacttttggtccacgcgcaccttgctgccgccgagaatggccttggcggactccacgaccttggccgtcatcttgccctcctcccaccagatcaccatcttgtcgacgcaatcgttgaagggaaagttctcattggtccagttgacgcagccgaagggcgaattc

SEQ ID NO: 513 - protein, 728 aa, unidentified
  source 1..728: note = Adeno-associated virus
MAADGYLPDWLEDNLSEGIREWWDLKPGAPKPKANQQKQDDGRGLVLPGYRYLGPFNGLDKGEPVNEADAAALEHDKAYDKQLEQGDNPYLKYNHADAEFQERLQEDTSFGGNLGRAVFQAKKRVLEPLGLVEEGAKTAPGKKRPIESPDSSTGIGKNGQPPAKKKLNFGQTGDSESVPDPQPLGEPPAAPSGLGSGTMAAGGGAPMADNNEGADGVGNASGNWHCDSTWLGDRVITTSTRTWALPTYNNHLYKQISSQSGATNDNHFFGYSTPWGYFDFNRFHCHFSPRDWQRLINNNWGFRPRKLRFKLFNIQVKEVTTNDGVTTIANNLTSTIQVFSDSEYQLPYVLGSAHQGCLPPFPADVFMIPQYGYLTLNNGSQSVGRSSFYCLEYFPSQMLRTGNNFEFSYTFEEVPFHSSYAHSQSLDRLMNPLIDQYLYYLARTQSTTGSTRELQFHQAGPNTMAEQSKNWLPGPCYRQQRLSKNIDSNNNSNFAWTGATKYHLNGRNSLTNPGVAMATNKDDEDQFFPINGVLVFGKTGAANKTTLENVLMTSEEEIKTTNPVATEEYGVVSSNLQSSTAGPQTQTVNSQGALPGMVWQNRDVYLQGPIWAKIPHTDGNFHPSPLMGGFGLKHPPPQILIKNTPVPANPPEVFTPAKFASFITQYSTGQVSVEIEWELQKENSKRWNPEIQYTSNYAKSNNVEFAVNNEGVYTEPRPIGTRYLTRNL

SEQ ID NO: 514 - protein, 728 aa, unidentified
  source 1..728: note = Adeno-associated virus
MAADGYLPDWLEGNLSEGIREWWDLKPGAPKPKANQQKQDDGRGLVLPGYRYLGPFNGLDKGEPVNEADAAALEHDKAYDKQLEQGDNPYLKYNHADAEFQERLQEDTSFGGNLGRAVFQAKKRVLEPLGLVEEGAKTAPGKKRPIESPDSSTGIGKNGQPPAKKKLNFGQTGDSESVPDPQPLGEPPAAPSGLGSGTMAAGGGAPMADNNEGADGVGNASGNWHCDSTWLGDRVITTSTRTWALPTYNNHLYKQISSQSGATNDNHFFGYSTPWGYFDFNRFHCHFSPRDWQRLINNNWGFRPRKLRFKLFNIQVKEVTTNDGVTTIANNLTSTIQVFSDSEYQLPYVLGSAHQGCLPPFPADVFMIPQYGYLTLNNGSQSVGRSSFYCLEYFPSQMLRTGDNFEFSYTFEEVPFHSSYAHSQSLDRLMNPLIDQYLYYLARTQSTTGSTRELQFHQAGPNTMAEQSKNWLPGPCYRQQRLSKNIDSNNNSNFAWTGATKYHLNGRNSLTNPGVAMATNKDDEDQFFPINGVLVFGKTGAANKTTLENVLMTSEEEIKTTNPVATEEYGVVSSNLQSSTAGPQTQTVNSQGALPGMVWQNRDVYLQGPIWAKIPHTDGNFHPSPLMGGFGLKHPPPQILIKNTPVPANPPEVFTPAKFASFITQYSTGQVSVEIEWELQKENSKRWNPEIQYTSNYAKSNNVEFAVNNEGVYTEPRPIGTRYLTRNL

SEQ ID NO: 515 - DNA, 3106 bp, unidentified
  source 1..3106: mol_type = unassigned DNA; note = Adeno-associated virus
gcggccgcgaattcgcccttcgcagagaccaaagttcaactgaaacgaatcagccggtttattgattaacaagtaattacaggttacgggtgaggtaacgggtgccaatggggcgaggctcagtataaaccccttcgttgttgacagcaaattccacattattagacttggcataatttgaggtgtactgaatctctggattccagcgtttgctgttttctttctgcagttcccactcgatctccacgctgacctggccggtgctgtactgcgtgataaatgaggcaaacttggcaggagtaaacacctctggaggattagcaggtaccggggtgtttttgatgagaatttgaggaggcgggtgtttgagtccaaatccgcccatcaggggagacgggtgaaagttgccgtccgtgtgaggaattttggcccagatgggaccctgcaggtacacgtcccggttctgccagaccatgccgggcagagccccctggctgttgacagtctgtgtctggggtccggccgtagacgattgcaggttgctggagaccacaccgtattcttctgtagccacgggattggtggttttgatctcctcctcgctggtcattagcacgttttccagcgttgtcttgttggcagcccccgttttgccaaaaaccagcactccgttgatgggaaagaactggtcctcgtcgtccttgttggtggccatggctacgcccgggttggttaatgaatttctaccattcagatggtatttagtggccccggtccaggcaaagttactgttgttgttgctgtctatgttttttgacagtctctgctgccgataacagggtccgggcagccagttctttgattgctcggccatggtgttgggcccagcctgatggaactgcagctcccttgtggaccccgtagtgctctgggtccgggccaggtagtacaggtactggtcgatgaggggattcatcagccggtccaggctctggctgtgcgcatagctgctgtggaaaggcacttcctcaaaggtgtagctgaattcaaagttatcgcccgttctcagcatctgagaaggaaagtactccaggcagtagaaggaggaacgtcccacagactgactgccgttgtttagagtcagatatccgtactgaggaatcatgaacacgtccgcagggaacggagggaggcagccctggtgcgcagagccgaggacgtacggcagttggtactccgagtccgagaagacctgaatcgtgctggtaaggttattagcgatggtcgtaacgccgtcgttcgtcgtgacctccttgacctggatgttgaacaacttgaaccgcagctttctgggccggaatccccagttgttgttgatgagtcgctgccagtcacgtggtgagaagtggcagtggaatctgttgaagtcaaaatagccccagggggtgctgtagccgaagaagtggttgtcgttggtagccccgctctgacttgatatctgcttgtagaggtggttgttgtaggtgggcagggcccaggtgcgggtgctggtggtgatgactctgtcgcccagccatgtggaatcgcaatgccaatttccggaggcattacccactccgtcggcgccttcgttattgtctgccattggtgcgccaccgcctgcagccattgtaccagatcccagacctgagggcgcggcgggaggttctccgagaggttgggggtcgggcactgactctgagtcgccagtctgcccaaagttgagcttctttttagcgggcggctggccgttcttgccgatgcccgtggaggagtcgggggattctatgggtctcttctttccaggagccgtcttagcgccttcctcaaccagaccgagaggttcgagaacccgcttcttggcctggaagactgctcgcccgaggttgcccccaaaagacgtatcttcttgaagacgctcctgaaactcggcgtcggcgtggttgtacttgaggtacgggttgtccccctgctcgagctgcttgtcgtaggccttgtcgtgctcgagggccgcggcgtctgcctcgttgaccggctctcccttgtcgagtccgttgaagggtccgaggtacctgtagccaggaagcaccagaccccggccgtcgtcctgcttttgctggttggctttgggtttcggggctccaggtttcaagtcccaccactcgcgaatgccctcagagaggttgccctcgagccaatctggaagataaccatcggcagccatacctggtttaagtcatttattgctcagaaacacagtcatccaggtccacgttggccagatcgcaggccgagcaagcaatctcgggagcccgccccagcagatgatgaatggcacagagtttccgatacgtcctctttctgacgaccggttgagattctgacacgccggggaaacattctgaacagtctctggtcccgtgcgtgaagcaaatgttgaaattctgattcattctctcgcatgtcttgcaggggaacagcatctgaagcatgcccgcgtgacgagaacatttgttttggtacctgtcggcaaagtccaccggagctccttccgcgtctgacgtcgatggatccgcgactgaggggcaggcccgcttgggctcgcttttatccgcgtcatcgggggcgggtctcttgttggctccaccctttctgacgtagaactcatacgccacctcggtcacgtgatcctgcgcccagcggaagaactctttgacttcctgctttgtcaccttgccaaagtcatgctccagacggcgggtgagttcaaatttgaacatccggtcttgtaacggctgctggtgctcgaaggtggtgctgttcccgtcaatcacggcgcacatgttggtgttggaagtgacgatcacgggggtgggatcgatctgggcggacgacttgcacttttggtccacgcgcaccttgctgccgccgagaatggccttggcggactccacgaccttggccgtcatcctgccctcctcccaccagatcaccatcttgtcgacgcaatcgttgaagggaaagttctcattggtccagttgacgcagccgtagaaagggcgaattc

SEQ ID NO: 516 - protein, 728 aa, unidentified
  source 1..728: note = Adeno-associated virus
MAADGYLPDWLEDNLSEGIREWWDLKPGAPKPKANQQKQDDGRGLVLPGYKYLGPFNGLDKGEPVNEADAAALEHDKAYDKQLEQGDNPYLKYNHADAEFQERLQEDTSFGGNLGRAVFQAKKRVLEPLGLVEEGAKTAPGKKRPIESPDSSTGIGKKGQQPAKKKLNFGQTGDSESVPDPQPLGEPPAAPSGLGSGTMAAGGGAPMADNNEGADGVGNASGNWHCDSTWLGDRVITTSTRTWALPTYNNHLYKQISSQSGATNDNHFFGYSTPWGYFDFNRFHCHFSPRDWQRLINNNWGFRPRKLRFKLFNIQVKEVTTNDGVTTIANNLTSTIQVFSDSEYQLPYVLGSAHQGCLPPFPADVFMIPQYGYLTLNNGSQSMGRSSFYCLEYFPSQMLRTGNNFEFSYTFEEVPFHSSYAHSQSLDRLMNPLIDQYLYYLARTQSTTGSTRELQFHQAGPNTMAEQSKNWLPGPCYRQQRLSKNIDSNNNSNFAWTGATKYHLNGRNSLTNPGVAMATNKDDEGQFFPINGVLVFGKTGAANKTTLENVLMTSEEEIKTTNPVATEEYGVVSSNLQSSTAGPQTQTVNSQGALPGMVWQNRDVYLQGPIWAKIPHTDGNFHPSPLMGGFGLKHPPPQILIKNTPVPANPPGVFTPALFASFITQYSTGQVSVEIEWELQKENSKRWNPEIQYTSNYAKSNNVEFAVNNEGVYTEPRPIGTRYLTRNL

SEQ ID NO: 517 - DNA, 3098 bp, unidentified
  source 1..3098: mol_type = unassigned DNA; note = Adeno-associated virus
gaattcgcccttcgcagagaccaaagttcaactgaaacgaatcaaccggtttattgattaacaagtaattacaggttacgggtgaggtaacgggtgccaatggggcgaggctcagtataaaccccttcgttgttgacagcaaattccacattattagacttggcataatttgaggtgtactgaatctctggattccagcgtttgctgttttctttctgcagttcccactcgatctccacgctgacctggccggtgctgtactgcgtgataaatgaggcaaactaggcaggagtaaacacccctggaggattagcaggtaccggggtgtttttgatgagaatttgaggaggcgggtgtttgagtccaaatccgcccatcaggggagacgggtgaaagttgccgtccgtgtgaggaattttggcccagatgggaccctgcaggtacacgtcccggttctgccagaccatgccgggcagagccccctggctgttgacagtctgtgtctggggtccggccgtagacgattgcaggttgctggagaccacaccgtattcttctgtagccacgggattggtggttttgatctcctcctcgctggtcattagcacgttttccagcgttgtcttgttggcagcccccgttttgccaaaaaccagcactccgttgatgggaaagaactggccctcgtcgtccttgttggtggccatggctacgcccgggttggttaatgaatttctaccattcagatggtatttagtggccccggtccaggcaaagttactgttgttgttgctgtctatgttttttgacagtctctgctgccgataacagggtccgggcagccagttctttgattgctcggccatggtgttgggcccagcctgatggaactgcagctcccttgtggaccccgtagtgctctgggtccgggccaggtagtacaggtactggtcgatgaggggattcatcagccggtccaggctctggctgtgcgcatagctgctgtggaaaggcacttcctcaaaggtgtagctgaattcaaagttattgcccgttctcagcatctgagaaggaaagtactccaggcagtagaaggaggaacgtcccatagactgactgccgttgtttagagtcagatatccgtactgaggaatcatgaacacgtccgcagggaacggagggaggcagccctggtgcgcagagccgaggacgtacggcagttggtactccgagtccgagaagacctgaatcgtgctggtaaggttattagcgatggtcgtaacgccgtcgttcgtcgtgacctccttgacctggatgttgaacaacttgaaccgcagctttctgggccggaatccccagttgttgttgatgagtcgctgccagtcacgtggtgagaagtggcagtggaatctgttgaagtcaaaatagccccagggggtgctgtagccgaagaagtggttgtcgttggtagccccgctctgacttgatatctgcttgtagaggtggttgttgtaggtgggcagggcccaggtgcgggtgctggtggtgatgactctgtcgcccagccatgtggaatcgcaatgccaatttccggaggcattacccactccgtcggcgccttcgttattgtctgccattggtgcgccaccgcctgcagccattgtaccagatcccagacctgagggcgcggcgggaggttctccgagaggttgggggtcgggcactgactctgagtcgccagtctgcccaaagttgagcttctttttagcgggctgctggcctttcttgccgatgcccgtggaggagtcgggggattctatgggtctcttctttccaggagccgtcttagcgccttcctcaaccagaccgagaggttcgagaacccgcttcttggcctggaagactgctcgcccgaggttgcccccaaaagacgtatcttcttgaagacgctcctgaaactcagcgtcggcgtggttgtacttgaggtacgggttgtccccctgctcgagctgcttgtcgtaggccttgtcgtgctcgagggccgcggcgtctgcctcgttgaccggctctcccttgtcgagtccgttgaagggtccgaggtacttgtagccaggaagcaccagaccccggccgtcgtcctgcttttgctggttggctttgggtttcggggctccaggtttcaagtcccaccactcgcgaatgccctcagagaggttgtcctcgagccaatctggaagataaccatcggcagccatacctggtttaagtcatttattgctcagaaacacagtcatccaggtccacgttgaccagatcgcaggccgagcaagcaatctcgggagcccgccccagcagatgatgaatggcacagagtttccgatacgtcctctttctgacgaccggttgagattctgacacgccggggaaacattctgaacagtctctggtcccgtgcgtgaagcaaatgttgaaattctgattcattctctcgcatgtcttgcagggaaacagcatctgaagcatgcccgcgtgacgagaacatttgttttggtacctgtcggcaaagtccaccggagctccttccgcgtctgacgtcgatggatccgcgactgaggggcaggcccgcttgggctcgcttttatccgcgtcatcgggggcgggcctcttgttggctccaccctttctgacgtagaactcatgcgccacctcggtcacgtgatcctgcgcccagcggaagaactctttgacttcctgctttgtcaccttgccaaagtcctgctccagacggcgggtgagttcaaatttgaacatccggtcttgtaacggctgctggtgctcgaaggtggtgctgttcccgtcaatcacggcgcacatgttggtgttggaagtgacgatcacgggggtgggatcgatctgggcggacgacttgcacttttggtccacgcgcaccttgctgccgccgagaatggccttggcggactccacgaccttggccgtcatcttgccctcctcccaccagatcaccatcttgtcgacgcaatcgttgaagggaaagttctcattggtccagttgacgcagccgtagaaagggcgaattc

SEQ ID NO: 518 - DNA, 2187 bp, unidentified
  source 1..2187: mol_type = unassigned DNA; note = Adeno-associated virus
atggctgccgatggttatcttccagattggctcgagggcaacctctctgagggcattcgcgagtggtgggacttgaaacctggagccccgaaacccaaagccaaccagcaaaagcaggacgacggccggggtctggtgcttcctggctacaggtacctcggacccttcaacggactcgacaagggagagccggtcaacgaggcagacgccgcggccctcgagcacgacaaggcctacgacaagcagctcgagcagggggacaacccgtacctcaagtacaaccacgccgacgccgagtttcaggagcgtcttcaagaagatacgtcttttgggggcaacctcgggcgagcagtcttccaggccaagaagcgggttctcgaacctctcggtctggttgaggaaggcgctaagacggctcctggaaagaagagacccatagaatcccccgactcctccacgggcatcggcaagaacggccagccgcccgctaaaaagaagctcaactttgggcagactggcgactcagagtcagtgcccgacccccaacctctcggagaacctcccgccgcgccctcaggtctgggatctggtacaatggctgcaggcggtggcgcaccaatggcagacaataacgaaggcgccgacggagtgggtaatgcctccggaaattggcattgcgattccacatggctgggcgacagagtcatcaccaccagcacccgcacctgggccctgcccacctacaacaaccacctctacaagcagatatcaagtcagagcggggctaccaacgacaaccacttcttcggctacagcaccccctggggctattttgacttcaacagattccactgccacttctcaccacgtgactggcagcgactcatcaacaacaactggggattccggcccagaaagctgcggttcaagttgttcaacatccaggtcaaggaggtcacgacgaacgacggcgttacgaccatcgctaataaccttaccagcacgattcaggtcttctcggactcggagtaccaactgccgtacgtcctcggctctgcgcaccagggctgcctccctccgttccctgcggacgtgttcatgattcctcagtacggatatctgactctaaacaacggcagtcagtctgtgggacgttcctccttctactgcctggagtactttccttctcagatgctgagaacgggcgataactttgaattcagctacacctttgaggaagtgcctttccacagcagctatgcgcacagccagagcctggaccggctgatgaatcccctcatcgaccagtacctgtactacctggcccggacccagagcactacggggtccacaagggagctgcagttccatcaggctgggcccaacaccatggccgagcaatcaaagaactggctgcccggaccctgttatcggcagcagagactgtcaaaaaacatagacagcaacaacaacagtaactttgcctggaccggggccactaaataccatctgaatggtagaaattcattaaccaacccgggcgtagccatggccaccaacaaggacgacgaggaccagttctttcccatcaacggagtgctggtttttggcaaaacgggggctgccaacaagacaacgctggaaaacgtgctaatgaccagcgaggaggagatcaaaaccaccaatcccgtggctacagaagaatacggtgtggtctccagcaacctgcaatcgtctacggccggaccccagacacagactgtcaacagccagggggctctgcccggcatggtctggcagaaccgggacgtgtacctgcagggtcccatctgggccaaaattcctcacacggacggcaactttcacccgtctcccctgatgggcggatttggactcaaacacccgcctcctcaaattctcatcaaaaacaccccggtacctgctaatcctccagaggtgtttactcctgccaagtttgcctcatttatcacgcagtacagcaccggccaggtcagcgtggagatcgagtgggaactgcagaaagaaaacagcaaacgctggaatccagagattcagtacacctcaaattatgccaagtctaataatgtggaatttgctgtcaacaacgaaggggtttatactgagcctcgccccattggcacccgttacctcacccgtaacctgtaa

SEQ ID NO: 519 - protein, 728 aa, unidentified; identical to SEQ ID NO: 514
  source 1..728: note = Adeno-associated virus

SEQ ID NO: 520 - protein, 728 aa, unidentified
  source 1..728: note = Adeno-associated virus
MAADGYLPDWLEDNLSEGIREWWDLKPGAPKPKANQQKQDDGRGLVLPGYRYLGPFNGLDKGEPVNEADAAALEHDKAYDKQLEQGDNPYLKYNHADAEFQERLQEDTSFGGNLGRAVFQAKKRVLEPLGLVEEGAKTAPGKKRPIESPDSSTGIGKNGQPPAKKKLNFGQTGDSESVPDPQPLGEPPAAPSGLGSGTMAAGGGAPMADNNEGADGVGNASGNWHCDSTWLGDRVITTSTRTWALPTYNNHLYKQISSQSGATNDNHFFGYSTPWGYFDFNRFHCHFSPRDWQRLINNNWGFRPRKLRFKLFNIQVKEVTTNDGVTTIANNLTSTIQVFSDSEYQLPYVLGSAHQGCLPPFPADVFMIPQYGYLTLNNGSQSVGRSSFYCLEYFPSQMLRTGDNFEFSYTFEEVPFHSSYAHSQSLDRLMNPLIDQYLYYLARTQSTTGSTRELQFHQAGPNTMAEQSKNWLPGPCYRQQRLSKNIDSNNNSNFAWTGATKYHLNGRNSLTNPGVAMATNKDDEDQFFPINGVLVFGKTGAANKTTLENVLMTSEEEIKTTNPVATEEYGVVSSNLQSSTAGPQTQTVNSQGALPGMVWQNRDVYLQGPIWAKIPHTDGNFHPSPLMGGFGLKHPPPQILIKNTPVPANPPEVFTPAKFASFITQYSTGQVSVEIEWELQKENSKRWNPEIQYTSNYAKSNNVEFAVNNEGVYTEPRPIGTRYLTRNL

SEQ ID NO: 521 - protein, 728 aa, unidentified; identical to SEQ ID NO: 513
  source 1..728: note = Adeno-associated virus

SEQ ID NO: 522 - protein, 728 aa, unidentified
  source 1..728: note = Adeno-associated virus
MAADGYLPDWLEDNLSEGIREWWDLKPGAPKPKANQQKQDDGRGLVLPGYKYLGPFNGLDKGEPVNEADAAALEHDKAYDKQLEQGDNPYLKYNHADAEFQERLQEDTSFGGNLGRAVFQAKKRVLEPLGLVEEGAKTAPGKKRPIESPDSSTGIGKNGQPPAKKKLNFGQTGDSESVPDPQPLGEPPAAPSGLGSGTMAAGGGAPMADNNEGADGVGNASGNWHCDSTWLGDRVITTSTRTWALPTYNNHLYKQISSQSGATNDNHFFGYSTPWGYFDFNRFHCHFSPRDWQRLINNNWGFRPRKLRFKLFNIQVKEVTTNDGVTTIANNLTSTIQVFSDSEYQLPYVLGSAHQGCLPPFPADVFMIPQYGYLTLNNGSQSVGRSSFYCLEYFPSQMLRTGNNFEFSYTFEEVPFHSSYAHSQSLDRLMNPLIDQYLYYLARTQSTTGSTRELQFHQAGPNTMAEQSKNWLPGPCYRQQRLSKNIDSNNNSNFAWTGATKYHLNGRNSLTNPGVAMATNKDDEDQFFPINGVLVFGKTGAANKTTLENVLMTSEEEIKTTNPVATEEYGVVSSNLQSSTAGPQTQTVNSQGALPGMVWQNRDVYLQGPIWAKIPHTDGNFHPSPLMGGFGLKHPPPQILIKNTPVPANPPEVFTPAKFASFITQYSTGQVSVEIEWELQKENSKRWNPEIQYTSNYAKSNNVEFAVNNEGVYTEPRPIGTRYLTRNL

SEQ ID NO: 523 - protein, 728 aa, unidentified
  source 1..728: note = Adeno-associated virus
MAADGYLPDWLEDNLSEGIREWWDLKPGAPKPKANQQKQDDGRGLVLPGYKYLGPFNGLDKGEPVNEADAAALEHDKAYDKQLEQGDNPYLKYNHADAEFQERLQEDTSFGGNLGRAVFQAKKRVLEPLGLVEEGAKTAPGKKRPIESPDSSTGIGKKGQQPAKKKLNFGQTGDSESVPDPQPLGEPPAAPSGLGSGTMAAGGGAPMADNNEGADGVGNASGNWHCDSTWLGDRVITTSTRTWALPTYNNHLYKQISSQSGATNDNHFFGYSTPWGYFDFNRFHCHFSPRDWQRLINNNWGFRPRKLRFKLFNIQVKEVTTNDGVTTIANNLTSTIQVFSDSEYQLPYVLGSAHQGCLPPFPADVFMIPQYGYLTLNNGSQSVGRSSFYCLEYFPSQMLRTGNNFEFSYTFEEVPFHSSYAHSQSLDRLMNPLIDQYLYYLARTQSTTGSTRELQFHQAGPNTMAEQSKNWLPGPCYRQQRLSKNIDSNNNSNFAWTGATKYHLNGRNSLTNPGVAMATNKDDEDQFFPINGVLVFGKTGAANKTTLENVLMTSEEEIKTTNPVATEEYGVVSSNLQSSTAGPQTQTVNSQGALPGMVWQNRDVYLQGPIWAKIPHTDGNFHPSPLMGGFGLKHPPPQILIKNTPVPANPPEVFTPAKFASFITQYSTGQVSVEIEWELQKENSKRWNPEIQYTSNYAKSNNVEFAVNNEGVYTEPRPIGTRYLTRNL

SEQ ID NO: 524 - DNA, 2215 bp, synthetic construct
  source 1..2215: mol_type = other DNA; note = Description of Artificial Sequence: Synthetic polynucleotide
atggctgccgatggttatcttccagattggctcgaggacactctctctgaaggaataagacagtggtggaagctcaaacctggcccaccaccaccaaagcccgcagagcggcataaggacgacagcaggggtcttgtgcttcctgggtacaagtacctcggacccttcaacggactcgacaagggagagccggtcaacgaggcagacgccgcggccctcgagcacgacaaagcctacgaccggcagctcgacagcggagacaacccgtacctcaagtacaaccacgccgacgccgagttccaggagcggctcaaagaagatacgtcttttgggggcaacctcgggcgagcagtcttccaggccaaaaagaggcttcttgaacctcttggtctggttgaggaagcggctaagacggctcctggaaagaagaggcctgtagagcactctcctgtggagccagactcctcctcgggaaccggaaaggcgggccagcagcctgcaagaaaaagattgaattttggtcagactggagacgcagactcagtcccagaccctcaaccaatcggagaacctcccgcagccccctcaggtgtgggatctcttacaatggctgcaggcggtggcgcaccaatggcagacaataacgagggcgccgacggagtgggtaattcctcgggaaattggcattgcgattccacatggatgggcgacagagtcatcaccaccagcacccgaacctgggccctgcccacctacaacaaccacctctacaagcaaatctccaacagcacatctggaggatcttcaaatgacaacgcctacttcggctacagcaccccctgggggtattttgactttaacagattccactgccacttttcaccacgtgactggcagcgactcatcaacaacaactggggattccggcccaagagactcagcttcaagctcttcaacatccaggtcaaggaggtcacgcagaatgaaggcaccaagaccatcgccaataacctcaccagcaccatccaggtgtttacggactcggagtaccagctgccgtacgttctcggctctgcccaccagggctgcctgcctccgttcccggcggacgtgttcatgattccccagtacggctacctaacactcaacaacggtagtcaggccgtgggacgctcctccttctactgcctggaatactttccttcgcagatgctgagaaccggcaacaacttccagtttacttacaccttcgaggacgtgcctttccacagcagctacgcccacagccagagcttggaccggctgatgaatcctctgattgaccagtacctgtactacttgtctcggactcaaacaacaggaggcacgacaaatacgcagactctgggcttcagccaaggtgggcctaatacaatggccaatcaggcaaagaactggctgccaggaccctgttaccgccagcagcgagtatcaaagacatctgcggataacaacaacagtgaatactcgtggactggagctaccaagtaccacctcaatggcagagactctctggtgaatccgggcccggccatggcaagccacaaggacgatgaagaaaagtttttttcctcagagcggggttctcatctttgggaagcaaggctcagagaaaacaaatgtggacattgaaaaggtcatgattacagacgaagaggaaatcaggacaaccaatcccgtggctacggagcagtatggttctgtatctaccaacctccagagaggcaacagacaagcagctaccgcagatgtcaacacacaaggcgttcttccaggcatggtctggcaggacagagatgtgtaccttcaggggcccatctgggcaaagattccacacacggacggacattttcacccctctcccctcatgggtggattcggacttaaacaccctccgcctcagatcctgatcaagaacacgcctgtacctgcggatcctccgaccaccttcaaccagtcaaagctgaactctttcatcacccagtattctactggccaagtcagcgtggagatcgagtgggagctgcagaaggaaaacagcaagcgctggaaccccgagatccagtacacctccaactactacaaatctacaagtgtggactttgctgttaatacagaaggcgtgtactctgaaccccgccccattggcacccgttacctcacccgtaatctgtaa

SEQ ID NO: 525 - protein, 737 aa, synthetic construct
  source 1..737: note = Description of Artificial Sequence: Synthetic polypeptide
MAADGYLPDWLEDTLSEGIRQWWKLKPGPPPPKPAERHKDDSRGLVLPGYKYLGPFNGLDKGEPVNEADAAALEHDKAYDRQLDSGDNPYLKYNHADAEFQERLKEDTSFGGNLGRAVFQAKKRLLEPLGLVEEAAKTAPGKKRPVEHSPVEPDSSSGTGKAGQQPARKRLNFGQTGDADSVPDPQPIGEPPAAPSGVGSLTMAAGGGAPMADNNEGADGVGNSSGNWHCDSTWMGDRVITTSTRTWALPTYNNHLYKQISNSTSGGSSNDNAYFGYSTPWGYFDFNRFHCHFSPRDWQRLINNNWGFRPKRLSFKLFNIQVKEVTQNEGTKTIANNLTSTIQVFTDSEYQLPYVLGSAHQGCLPPFPADVFMIPQYGYLTLNNGSQAVGRSSFYCLEYFPSQMLKTGNNFQFTYTFEDVPFHSSYAHSQSLDRLMNPLIDQYLYYLSRTQTTGGTTNTQTLGFSQGGPNTMANQAKNWLPGPCYRQQRVSKTSADNNNSEYSWTGATKYHLNGRDSLVNPGPAMASHKDDEEKFFPQSGVLIFGKQGSEKTNVDIEKVMITDEEEIRTTNPVATEQYGSVSTNLQRGNRQAATADVNTQGVLPGMVWQDRDVYLQGPIWAKIPHTDGHFHPSPLMGGFGLKHPPPQILIKNTPVPADPPTTFNQSKLNSFITQYSTGQVSVEIEWELQKENSKRWNPEIQYTSNYYKSTSVDFAVNTEGVYSEPRPIGTRYLTRNL

SEQ ID NO: 526 - protein, 737 aa, synthetic construct
  source 1..737: note = Description of Artificial Sequence: Synthetic polypeptide
MAADGYLPDWLEDTLSEGIRQWWKLKPGPPPPKPAERHKDDSRGLVLPGYKYLGPFNGLDKGEPVNEADAAALEHDKAYDRQLDSGDNPYLKYNHADAEFQERLKEDTSFGGNLGRAVFQAKKRLLEPLGLVEEAAKTAPGKKRPVEHSPVEPDSSSGTGKAGQQPARKRLNFGQTGDADSVPDPQPIGEPPAAPSGVGSLTMAAGGGAPMADNNEGADGVGNSSGNWHCDSTWMGDRVITTSTRTWALPTYNNHLYKQISNSTSGGSSNDNAYFGYSTPWGYFDFNRFHCHFSPRDWQRLINNNWGFRPKRLSFKLFNIQVKEVTQNEGTKTIANNLTSTIQVFTDSEYQLPYVLGSAHQGCLPPFPADVFMIPQYGYLTLNNGSQAVGRSSFYCLEYFPSQMLKTGNNFQFTYTFEDVPFHSSYAHSQSLDRLMNPLIDQYLYYLSRTQTTGGTTNTQTLGFSQGGPNTMANQAKNWLPGPCYRQQRVSKTSADNNNSEYSWTGATKYHLNGRDSLVNPGPAMASHKDDEEKFFPQSGVLIFGKQGSEKTNVDIEKVMITDEEEIRTTNPVATEQYGSVSTNLQQGNTQAATADVNTQGVLPGMVWQDRDVYLQGPIWAKIPHTDGHFHPSPLMGGFGLKHPPPQILIKNTPVPADPPTTFNQSKLNSFITQYSTGQVSVEIEWELQKENSKRWNPEIQYTSNYYKSTSVDFAVNTEGVYSEPRPIGTRYLTRNL

SEQ ID NO: 527 - protein, 737 aa, synthetic construct
  source 1..737: note = Description of Artificial Sequence: Synthetic polypeptide
MAADGYLPDWLEDTLSEGIRQWWKLKPGPPPPKPAERHKDDSRGLVLPGYKYLGPFNGLDKGEPVNEADAAALEHDKAYDRQLDSGDNPYLKYNHADAEFQERLKEDTSFGGNLGRAVFQAKKRLLEPLGLVEEAAKTAPGKKRPVEHSPVEPDSSSGTGKAGQQPARKRLNFGQTGDADSVPDPQPIGEPPAAPSGVGSLTMAAGGGAPMADNNEGADGVGNSSGNWHCDSTWMGDRVITTSTRTWALPTYNNHLYKQISNSTSGGSSNDNAYFGYSTPWGYFDFNRFHCHFSPRDWQRLINNNWGFRPKRLSFKLFNIQVKEVTQNEGTKTIANNLTSTIQVFTDSEYQLPYVLGSAHQGCLPPFPADVFMIPQYGYLTLNNGSQAVGRSSFYCLEYFPSQMLRTGNNFQFTYTFEDVPFHSSYAHSQSLDRLMNPLIDQYLYYLSRTQTTGGTTNTQTLGFSQGGPNTMANQAKNWLPGPCYRQQRVSKTSADNNNSEYSWTGATKYHLNGRDSLVNPGPAMASHKDDEEKFFPQSGVLIFGKQGSEKTNVDIEKVMITDEEEIRTTNPVATEQYGSVSTNLQQGNTQAATADVNTQGVLPGMVWQDRDVYLQGPIWAKIPHTDGHFHPSPLMGGFGLKHPPPQILIKNTPVPADPPTTFNQSKLNSFITQYSTGQVSVEIEWELQKENSKRWNPEIQYTSNYYKSTSVDFAVNTEGVYSEPRPIGTRYLTRNL

SEQ ID NO: 528 - protein, 729 aa, unidentified
  source 1..729: note = Adeno-associated virus
MAADGYLPDWLEDNLSEGIREWWDLKPGAPKPKANQQKQDDGRGLVLPGYKYLGPFNGLDKGEPVNAADAAALEHDKAYDQQLKAGDNPYLRYNHADAEFQERLQEDTSFGGNLGRAVFQAKKRVLEPLGLVEEGAKTAPGKKRPIDSPDSSTGIGKKGQQPAKKKLNFGQTGDSESVPDPQPLGEPPAAPSSVGSGTMAAGGGAPTADNNEGADGVGNASGNWHCDSTWLGDRVITTSTRTWALPTYNNHLYKQISSSSSGATNDNHYFGYSTPWGYFDFNRFHCHFSPRDWQRLINNNWGFRPKKLRFKLFNIQVKEVTTNDGVTTIANNLTSTVQVFSDSEYQLPYVLGSAHQGCLPPFPADVFMIPQYGYLTLNNGSQSVGRSSFYCLEYFPSQMLRTGNNFEFSYSFEDVPFHSSYAHSQSLDRLMNPLIDQYLYYLARTQSTTGSTRELQFHQAGPNTMAEQSKNWLPGPCYRQQRLSKNLDFNNNSNFAWTAATKYHLNGRNSLTNPGIPMATNKDDEDQFFPINGVLVFGKTGAANKTTLENVLMTSEEEIKTTNPVATEEYGVVSSNLQSSTAGPQSQTINSQGALPGMVWQNRDVYLQGPIWAKIPHTDGNFHPSPLMGGFGLEHPPPQILIKNTPVPANPPEVFTPAKFASFITQYSTGQVSVEIEWELQKENSKRWNPEIQYTSNYAKSNNVEFAVNPDGVYTEPRPIGTRYLTRNL

SEQ ID NO: 529 - DNA, 3075 bp, unidentified
  source 1..3075: mol_type = unassigned DNA; note = Adeno-associated virus
tgagaactttcctttcaacgattgcgtcggacaagatggtgatctggtgggaggaggggaagatgaccgccaaggtcgtggagtcggccaaagccattcttggaggaagcaaggtgcgtgtggaccagaaatgcaagtcctcggcccagatagacccgactcccgtgatcgtcacctccaacaccaacatgtgcgccgtgattgacgggaactcaacgaccttcgagcaccagcagccgttgcaagaccggatgttcaaatttgaacttacccgccgtctggatcatgactttggaaaggtcaccaagcaggaagtgaaagactttttccggtgggcaaaggatcacgtggttgaggtggagcatgaattctacgtcaaaaagggtggagctaagaaaagacccgcccccagtgacgcagatataagtgagcccaaacgggcgcgcgagtcagttgcgcagccatcaacgtcagacgcggaagcttcgatcaactacgcggacaggtaccaaaaacaaatgttctcgtcacgtgggcatgaatctgatgctgtttccctgcagacaatgcgagagaatgaatcagaattcaaatatctgcttcactcacggacagaaagactgtttagagtgctttcccgtgtcagaatctcaacccgtttctgtcgtcaaaaaggcgtatcagaaactgtgctacattcatcatatcatgggaaaggtgccagacgcttgcactgcctgcgatctggtcaatgtggatttggatgactgcatctctgaacaataaatgatttaaatcaggtatggctgccgatggttatcctccagattggctcgaggacactctctctgaagggataagacagtggtggaagctcaaacctggcccaccaccaccaaagcccgcagagcggcataaggacgacagcaggggtcttgtgcttcctgggtacaagtacctcggacccttcaacggactcgacaagggggagccggtcaacgaggcagacgccgcggccctcgagcacgacaaggcctacgaccggcagctcgacagcggagacaacccgtacctcaagtacaaccacgccgacgcagagtttcaggagcgccttaaagaagatacgtcttttgggggcaacctcggacgagcagtcttccaggcgaaaaagagggttcttgaacctctgggcctggttgaggaacctgttaagacggctccgggaaaaaagaggccggtagagcactctcctgtggagccagactcctcctcgggaaccggaaaagcgggccagcggcctgcaagaaaaagattaaattttggtcagactggagacgcagactccgtacctgacccccagcctctcggacagccaccagcagccccctctggtctgggatctactacaatggctacaggcagtggcgcaccaatggcagacaataacgagggtgccgatggagtgggtaattcctcaggaaattggcattgcgattcccaatggctgggcgacagagtcatcaccaccagcacccgaacctgggccctgcccacatacaacaaccacctctacaagcaaatctccagccaatcaggagccagcaacgacaaccactactttggctacagcaccccctgggggtattttgacttcaacagattccactgccacttttcaccacgtgactggcaaagactcatcaacaacaactggggattccggcccaaaagactcaacttcaagctctttaatattcaagtcaaagaggtcacgcagaatgacggtacgacgacgattgccaataaccttaccagcacggttcaggtgtttactgactcggagtaccagctcccgtacgtcctgggctcggcgcatcaaggatgcctcccgccgtttccagcggacgtcttcatggtcccacagtatggatacctcaccctgaacaacgggagtcaggcggtaggacgctcttccttttactgcctggagtactttccttctcagatgctgcgtactggaaacaactttcagttcagctacacttttgaagacgtgcctttccacagcagctacgctcacagccagagtctggatcggctgatgaatcctctgatcgaccagtacctgtattatctgaacaagacacaaacaaatagtggaactcttcagcagtctcggctactgtttagccaagctggaccaaccaacatgtctcttcaagctaaaaactggctgcctggaccttgctacagacagcagcgtctgtcaaaacaggcaaacgacaacaacaacagcaactttccctggactgcagctacaaagtatcatctaaatggccgggactcgttggttaatccaggaccagctatggccagtcacaaggatgacgaagaaaagtttttccccatgcatggaaccctgatatttggtaaacaaggaacaaatgccaacgacgcggatttggaaaatgtcatgattacagatgaagaagaaatcagggccaccaatcccgtggctacggagcagtacgggactgtgtcaaataatttgcaaaactcaaacactggtccaactactggaactgtcaatcgccaaggagcgttacctggtatggtgtggcaggatcgagacgtgtacctgcagggacccatttgggccaagattcctcacaccgatggacactttcatccttctccactgatgggaggttttggactcaaacacccgcctcctcagatcatgatcaaaaacactcccgttccagccaatcctcccacaaacttcagttctgccaagtttgcttctttcatcacacagtattccacgggacaggtcagcgtggagatcgagtgggagctgcagaaggagaacagcaaacgctggaatcccgaaattcagtacacttccaactacaacaagtctgttaatgtggactttactgtggacactaatggtgtgtattcagagcctcgccccattggcaccagatacctgactcgtaatctgtaattgcttgttaatcaataaaccgtttaattcgtttcagttgaactttggtctctgcgaagggcgaa

SEQ ID NO: 530 - DNA, 3142 bp, unidentified
  source 1..3142: mol_type = unassigned DNA; note = Adeno-associated virus
aaaacgacgggccagtgattgtaatacgactcactatagggcgaaattgaaattagcggccgcgaattcgcctttcgcagagaccaaagttcaactgaaacgaattaaacggtttattgattaacaagcaattacagattacgagtcaggtatctggtgccaatggggcgaggctctgaatacacaccattagtgtccacagtaaagtccacattaacagacttgttgtagttggaagtgtactgaatttcgggattccagcgtttgctgttctccttctgcagctcccactcgatctccacgctgacctgtcccgtggaatactgtgtgatgaaagaagcaaacttggcagaactgaagtttgtgggaggattggctggaacgggagtgtttttgatcatgatctgaggaggcgggtgtttgagtccaaaacctcccatcagtggagaaggatgaaagtgtccatcggtgtgaggaatcttggcccaaatgggtccctgcaggtacacgtctcgatcctgccacaccataccaggtaacgctccttggtgattgacagttccagtagttggaccagtgtttgagttttgcaaattatttgacacagtcccgtactgctccgtagccacgggattggtggccctgatttcttcttcatctgtaatcatgacattttccaaatccgcgtcgttggcatttgttccttgtttaccaaatatcagggttccatgcatggggaaaaacttttcttcgtcatccttgtgactggccatagctggtcctggattaaccaacgagtcccggccatttagatgatactttgtagctgcagtccagggaaagttgctgttgttgttgtcgtttgcctgttttgacagacgctgctgtctgtagcaaggtccaggcagccagtttttagcttgaagagacatgttggttggtccagcttggctaaacagtagccgagactgctgaagagttccactatttgtttgtgtcttgttcagataatacaggtactggtcgatcagaggattcatcagccgatccagactctggctgtgagcgtagctgctgtggaaaggcacgtcttcaaaagtgtagctgaactgaaagttgtttccagtacgcagcatctgagaaggaaagtactccaggcagtaaaaggaagagcgtcctaccgcctgactcccgttgttcagggtgaggtatccatactgtgggaccatgaagacgtccgctggaaacggcgggaggcatccttgatgcgccgagcccaggacgtacgggagctggtactccgagtcagtaaacacctgaaccgtgctggtaaggttattggcaatcgtcgtcgtaccgtcattctgcgtgacctctttgacttgaatattaaagagcttgaagttgagtcttttgggccggaatccccggttgttgttgacgagtctttgccagtcacgtggtgaaaagtggcagtggaatctgttgaagtcaaaatacccccagggggtgctgtagccaaagtagtggttgtcgttgctggctcctgattggctggagatttgcttgtagaggtggttgttgtatgtgggcagggcccaggttcgggtgctggtggtgatgactctgtcgcccagccattgggaatcgcaatgccaatttcctgaggaattacccactccatcggcaccctcgttattgtctgccattggtgcgccactgcctgtagccattgtagtagatcccagaccagagggggctgctggtggctgtccgagaggctgggggtcaggtacggagtctgcgtctccagtctgaccaaaatttaatctttttcttgcaggctgctggcccgcttttccggttcccgaggaggagtctggctccacaggagagtgctctaccggcctcttttttcccggagccgtcttaacaggctcctcaaccaggcccagaggttcaagaaccctctttttcgcctggaagactgctcgtccgaggttgcccccaaaagacgtatcttctttaaggcgctcctgaaactctgcgtcggcgtggttgtacttgaggtacgggttgtctccgctgtcgagctgccggtcgtaggccttgtcgtgctcgagggccgcggcgtctgcctcgttgaccggctcccccttgtcgagtccgttgaagggtccgaggtacttgtacccaggaagcacaagacccctgctgtcgtccttatgccgctctgcgggctttggtggtggtgggccaggtttgagcttccaccactgtcttattccttcagagagagtgtcctcgagccaatctggaagataaccatcggcagccatacctgatttaaatcatttattgttcagagatgcagtcatccaaatccacattgaccagatcgcaggcagtgcaagcgtctggcacctttcccatgatatgatgaatgtagcacagtttctgatacgcctttttgacgacagaaacgggttgagattctgacacgggaaagcactctaaacagtctttctgtccgtgagtgaagcagatatttgaattctgattcattctctcgcattgtctgcagggaaacagcatcagattcatgcccacgtgacgagaacatttgttttggtacctgtccgcgtagttgatcgaagcttccgcgtctgacgtcgatggctgcgcaactgactcgcgcgcccgtttgggctcacttatatctgcgtcactgggggcgggtcttttcttagctccaccctttttgacgtagaattcatgctccacctcaaccacgtgatcctttgcccaccggaaaaagtctttcacttcctgcttggtgacctttccaaagtcatgatccagacggcgggtaagttcaaatttgaacatccggtcttgcaacggctgctggtgctcgaaggtcgttgagttcccgtcaatcacggcgcacatgttggtgttggaggtgacgatcacgggagtcgggtctatctgggccgaggacttgcatttctggtccacacgcaccttgcttcctccaagaatggctttggccgactccacgaccttggcggtcatcttcccctcctcccaccagatcaccatcttgtcgacgcaatggtaaaaggaaagttctcattgg

SEQ ID NO: 531 - protein, 735 aa, unidentified
  source 1..735: note = Adeno-associated virus 2
MAADGYLPDWLEDTLSEGIRQWWKLKPGPPPPKPAERHKDDSRGLVLPGYKYLGPFNGLDKGEPVNEADAAALEHDKAYDRQLDSGDNPYLKYNHADAEFQERLKEDTSFGGNLGRAVFQAKKRVLEPLGLVEEPVKTAPGKKRPVEHSPVEPDSSSGTGKAGQQPARKRLNFGQTGDADSVPDPQPLGEPPATPAAVGPTTMASGGGAPMADNNEGADGVGNASGNWHCDSTWLGDRVITTSTRTWALPTYNNHLYKQISSASTGASNDNHYFGYSTPWGYFDFNRFHCHFSPRDWQRLINNNWGFRPKRLNFKLFNIQVKEVTQNDGTTTIANNLTSTVQVFTDSEYQLPYVLGSAHQGCLPPFPADVFMIPQYGYLTLNNGSQAVGRSSFYCLEYFPSQMLRTGNNFTFSYTFEDVPFHSSYAHSQSLDRLMNPLIDQYLYYLNRTQNQSGSAQDKALLFSRGSPAGMSVQPKNWLPGPCYRQQRVSKTKTDNNNSNFTWTGASKYNLNGRESIINPGTAMASHKDDKDKFFPMSGVMIFGKESAGASNTALDNVMITDEEEIKATNPVATERFGTVAVNFQSSSTDPATGDVHVMGALPGMVWQDRDVYLQGPIWAKIPHTDGHFHPSPLMGGFGLKHPPPQILIKNTPVPANPPAEFSATKFASFITQYSTGQVSVEIEWELQKENSKRWNPEVQYTSNYAKSANVDFTVDNNGLYTEPRPIGTRYLTRP

SEQ ID NO: 532 - protein, 740 aa, unidentified
  source 1..740: note = Adeno-associated virus 2
MAADGYLPDWLEDTLSEGIRQWWKLKPGPPPPKPAERHKDDSRGLVLPGYKYLGPFNGLDKGEPVNAADAAALEHDKAYDRQLDSGDNPYLKYNHADAEFQERLKEDTSFGGNLGRAVFQAKKRVLEPLGLVEEPVKTAPGKKRPVEHSPVEPDSSSGTGKAGQQPARKRLNFGQTGDADSVPDPQPLGQPPAAPSGLGTNTMATGSGAPMADNNEGADGVGNSSGNWHCDSTWMGDRVITTSTRTWALPTYNNHLYKQISSQSGASNDNHYFGYSTPWGYFDFNRFHCHFSPRDWQRLINNNWGFRPKRLNFKLFNIQVKEVTQNDGTTTIANNLTSTVQVFTDSEYQLPYVLGSAHQGCLPPFPADVFMVPQYGYLTLNNGSQAVGRSSFYCLEYFPSQMLRTGNNFTFSYTFEDVPFHSSYAHSQSLDRLMNPLIDQYLYYLSRTNTPSGTTTQSGLQFSQAGASDIRDQSRNWLPGPCYRQQRVSKTSADNNNSEYSWTGATKYHLNGRDSLVNPGPAMASHKDDEEKFFPQSGVLIFGKQGSEKTNVDIEKVMITDEEEIRTTNPVATEQYGSVSTNLQRGNRQAATADVNTQGVLPGMVWQDRDVYLQGPIWAKIPHTDGHFHPSPLMGGFGLKHPPPQILIKNTPVPANPSTTFSAAKFASFITQYSTGQVSVEIEWELQKENSKRWNPEIQYTSNYNKSVNVDFTVDTNGVYSEPRPIGTRYLTRNLLLAAA

SEQ ID NO: 533 - protein, 734 aa, unidentified
  source 1..734: note = Adeno-associated virus 2
MAADGYLPDWLEDTLSEGIRQWWKLKPGPPPPKPAERHKDDSRGLVLPGYKYLGPFNGLDKGEPVNEADAAALEHDKAYDRQLDSGDNPYLKYNHADAEFQERLKEDTSFGGNLGRAVFQAKKRVLEPLGLVEEPVKTAPGKKRPVEHSPVEPDSSSGTGKAGQQPARKRLNFGQTGDADSVPDPQPLGQPPAAPSGLGTNTMATGSGAPMADNNEGADGVGNSSGNWHCDSTWMGDRVITTSTRTWALPTYNNHLYKQISSQSGASNDNHYFGYSTPWGYFDFNRFHCHFSPRDWQRLINNNWGFRPKRLNFKLFNIQVKEVTQNDGTTTIANNLTSTVQVFTDSEYQLPYVLGSAHQGCLPPFPADVFMVPQYGYLTLNNGSQAVGRSSFYCLEYFPSQMLRTGNNFTFSYTFEDVPFHSSYAHSQSLDRLMNPLIDQYLYYLSRTNTPSGTTTQSGLQFSQAGASDIRDQSRNWLPGPCYRQQRVSKTSADNNNSEYSWTGATMYHLNGRDSLVNPGPAMASHKDDEEKFFPQSGVLIFGKQGSEKTNVDIEKVMITDEEEIRTTNPVATEQYGSVSTNLQRGNRQAATADVNTQGVLPGMVWQDRDVYLQGPIWAKIPHTDGHFHPSPLMGGFGLKHPPPQILIKNTPVPANPSTTFSAAKFASFITQYSTGQVSVEIEWELQKENSKRWNPEIQYTSNYNKSINVDFTVDTNGVYSEPRPIGTRYLTRN

SEQ ID NO: 534 - protein, 734 aa, unidentified
  source 1..734: note = Adeno-associated virus 2
MAADGYLPDWLEDTLSEGIRQWWKLKPGPPPPKPAERHKDDSRGLVLPGYKYLGPFNGLDKGEPVNEADAAALEHDKAYDRQLDSGDNPYLKYNHADAEFQERLKEDTSFGGNLGRAVFQAKKRVLEPLGLVEEPVKTAPGKKRPVEHSPVEPDSSSGTGKAGQQPARKRLNFGQTGDADSVPDPQPLGQPPAAPSGLGTNTMATGSGAPMADNNEGADGVGNSSGNWHCDSTWMGDRVITTSTRTWALPTYNNHLYKQISSQSGASNDNHYFGYSTPWGYFDFNRFHCHFSPRDWQRLINNNWGFRPKRLNFKLFNIQVKEVTQNDGTTTIANNLTSTVQVFTDSEYQLPYVLGSAHQGCLPPFPADVFMVPQYGYLTLNNGSQAVGRSSFYCLEYFPSQMLRTGNNFTFSYTFEDVPFHSSYAHSQSLDRLMNPLIDQYLYYLSRTNTPSGTTTQSGLQFSQAGASDIRDQSRNWLPGPCYRQQRVSKTSADNNNSEYSWTGATKYHLNGRDSLVNPGPAMASHKDDEEKFFPQSGVLIFGKQGSEKTNVDIEKVMITDEEEIRTTNPVATEQYGSVSTNLQRGNRQAATADVNTQGVLPGMVWQDRDVYLQGPIWAKIPHTDGHFHPSPLMGGFGLKHPPPQILIKNTPVPANPSTTFSEAKFASFITQYSTGQVSVEIEWELQKENSKRWNPEIQYTSNYNKSVNVDFTVDTNGVYSEPRPIGTRYLTRN

SEQ ID NO: 535 - protein, 739 aa, unidentified
  source 1..739: note = Adeno-associated virus 2
MAADGYLPDWLEDTLSEGIRQWWKLKPGPPPPKPAERHKDDSRGLVLPGYKYLGPFNGLDKGEPVNEADAAALEHDKAYDRQLDSGDNPYLKYNHADAEFQERLKEDTSFGGNLGRAVFQAKKRVLEPLGLVEEPVKTAPGKKRPVEHSPVEPDSSSGTGKAGQQPARKRLNFGQTGDADSVPDPQPLGQPPAAPSGLGTNTMATGSGAPMADNNEGADGVGNSSGNWHCDSTWMGDRVITTSTRTWALPTYNNHLYKQISSQSGASNDNHYFGYSTPWGYFDFNRFHCHFSPRDWQRLINNNWGFRPKRLNFKLFNIQVKEVTQNDGTTTIANNLTSTVQVFTDSEYQLPYVLGSAHQGCLPPFPADVFMVPQYGYLTLNNGSQAVGRSSFYCLEYFPSQMLRTGNNFTFSYTFEDVPFHSSYAHSQSLDRLMNPLIDQYLYYLSRTNTPSGTTTQSGLQFSQAGASDIRDQSRNWLPGPCYRQQRVSKTSADNNNSEYSWTGATKYHLNGRDSLVNPGPAMASHKDDEEKFFPQSGVLIFGKQGSEKTNVDIEKVMITDEEEIRTTNPVATEQYGSVSTNLQRGNRQAATADVNTQGVLPGMVWQDRDVYLQGPIWAKIPHTDGHFHPSPLMGGFGLKHPPPQILIKNTPVPANPSTTFSAAKFASFITQYSTGQVSVEIEWELQKENSKRWNPEIQYTSNYNKSVNVDFTVDTNGVYSEPRPIGTRYLTRNLLLAA

SEQ ID NO: 536 - protein, 725 aa, unidentified
  source 1..725: note = Adeno-associated virus 2
MAADGYLPDWLEDTLSEGIRQWWKLKPGPPPPKPAERHKDDSRGLVLPGYKYLGPFNGLDKGEPVNEADAAALEHDKAYDRQLDSGDNPYLKYNHADAEFQERLKEDTSFGGNLGRAVFQAKKRVLEPLGLVEEPVKTAPGKKRPVEHSPVEPDSSSGTGKAGQQPARKRLNFGQTGDADSVPDPQPLGQPPAAPSGLGTNTMATGSGAPMADNNEGADGVGNSSGNWHCDSTWMGDRVITTSTRTWALPTYNNHLYKQISSQSGASNDNHYFGYSTPWGYFDFNRFHCHFSPRDWQRLINNNWGFRPKRLNFKLFNIQVKEVTQNDGTTTIANNLTSTVQVFTDSEYQLPYVLGSAHQGCLPPFPADVFMVPQYGYLTLNNGSQAVGRSSFYCLEYFPSQMLRTGNNFTFSYTFEDVPFHSSYAHSQSLDRLMNPLIDQYLYYLSRTNTPSGTTTQSGLQFSQAGASDIRDQSRNWLPGPCYRQQRVSKTSADNNNSEYSWTGATKYHLNGRDSLVNPGPAMASHKDDEEKFFPQSGVLIFGKQGSEKTNVDIEKVMITDEEEIRTTNPVATEQYGSVSTNLQRGNRQAATADVNTQGVLPGMVWQDRDVYLQGPIWAKIPHTDGHFHPSPLMGGFGLKHPPPQILIKNTPVPANPSTTFSAAKFASFITQYSTGQVSVEIEWELQKENSKRWNPEIQYTSNYNKSVNVDFTVDTNGVYSEPRP

SEQ ID NO: 537 - protein, 707 aa, unidentified
  source 1..707: note = Adeno-associated virus 2
MAADGYLPDWLEDTLSEGIRQWWKLKPGPPPPKPAERHKDDSRGLVLPGYKYLGPFNGLDKGEPVNEADAAALEHDKAYDRQLDSGDNPYLKYNHADAEFQERLKEDTSFGGNLGRAVFQAKKRVLEPLGLVEEPVKTAPGKKRPVEHSPVEPDSSSGTGKAGQQPARKRLNFGQTGDADSVPDPQPLGQPPAAPSGLGTNTMATGSGAPMADNNEGADGVGNSSGNWHCDSTWMGDRVITTSTRTWALPTYNNHLYKQISSQSGASNDNHYFGYSTPWGYFDFNRFHCHFSPRDWQRLINNNWGFRPKRLNFKLFNIQVKEVTQNDGTTTIANNLTSTVQVFTDSEYQLPYVLGSAHQGCLPPFPADVFMVPQYGYLTLNNGSQAVGRSSFYCLEYFPSQMLRTGNNFTFSYTFEDVPFHSSYAHSQSLDRLMNPLIDQYLYYLSRTNTPSGTTTQSGLQFSQAGASDIRDQSRNWLPGPCYRQQRVSKTSADNNNSEYSWTGATKYHLNGRDSLVNPGPAMASHKDDEEKFFPQSGVLIFGKQGSEKTNVDIEKVMITDEEEIRTTNPVATEQYGSCIYQPPERQQTSSYRRCQHTRRSSRHGLAGQRCVPSGAHLGKDSTHGRTFSPLSPHGWIRTTPSSTDSHQEHPGTCESFDHLQCGKVCFLHHTVLHGTGQRGDRVRAAEGKQQTLESRNSVHFQLQQVC

SEQ ID NO: 538 - protein, 739 aa, unidentified; identical to SEQ ID NO: 535
  source 1..739: note = Adeno-associated virus 2

SEQ ID NO: 539 - protein, 737 aa, unidentified
  source 1..737: note = Adeno-associated virus 2
MASDGYLPDWLEDNLSEGIREWWDLKPGAPKPKANQQKQDDGRGLVLPGYKYLGPFNGLDKGEPVNAADAAALEHDKAYDQQLKAGDNPYLRYNHADAEFQERLQEDTSFGGNLGRAVFQAKKRVLEPFGLVEEGAKTAPGKKRPVEQSPQEPDSSSGIGKTGQQPAKKRLNFGQTGDSESVPDPQPLGEPPATPAAVGPTTMASGGGAPMADNNEGADGVGNASGNWHCDSTWLGDRVITTSTRTWALPTYNNHLYKQISSASTGASNDNHYFGYSTPWGYFDFNRFHCHFSPRDWQRLINNNWGFRPKRLNFKLFNIQVKEVTTNDGTTTIANNLTSTVQVFTDSEYQLPYVLGSAHQGCLPPFPADVFMVPQYGYLTLNNGSQAVGRSSFYCLEYFPSQMLRTGNNFTFSYTFEDVPFHSSYAHSQSLDRLMNPLIDQYLYYLSRTNTPSGTTTQSGLQFSQAGASDIRDQSRNWLPGPCYRQQRVSKTSADNNNSEYSWTGATKYHLNGRDSLVNPGPAMASHKDDEEKFFPQSGVLIFGKQGSEKTNVDIEKVMITDEEEIRTTNPVATEQYGSVSTNLQRGNRQAATADVNTQGVLPGMVWQDRDVYLQGPIWAKIPHTDGHFHPSPLMGGFGLKHHPPQILIKNTPVPANPSTTFSAAKFASFITQYSTGQVSVEIEWELQKENSKRWNPEIQYTSNYNKSVNVDFTVDTNGVYSEPRPIGTRYLTRNLL

SEQ ID NO: 540 - protein, 741 aa, unidentified
  source 1..741: note = Adeno-associated virus 2
MAADGYLPDWLEDTLSEGIREWWALKPGAPKPKANQQKQDDGRGLVLPGYKYLGPFNGLDKGEPVNEADAAALEHDKAYDQQLQAGDNPYLRYNHADAEFQERLQEDTSFGGNLGRAVFQAKKRVLEPLGLVEEPVKTAPGKKRPVEHSPVEPDSSSGTGKSGQQPARKRLNFGQTGDADSVPDPQPLGQPPAAPSGLGTNTMATGSGAPMADNNEGADGVGNSSGNWHCDSTWMGDRVITTSTRTWALPTYNNHLYKQISSQSGASNDNHYFGYSTPWGYFDFNRFHCHFSPRDWQRLINNNWGFRPKRLNFKLFNIQVKEVTQNDGTTTIANNLTSTVQVFTDSEYQLPYVLGSAHQGCLPPFPADVFMVPQYGYLTLNNGSQAVGRSSFYCLEYFPSQMLRTGNNFTFSYTFEDVPFHSSYAHSQSLDRLMNPLIDQYLYYLSRTNTPSGTTTQSGLQFSQAGASDIRDQSRNWLPGPCYRQQRVSKTSADNNNSEYSWTGATKYHLNGRDSLVNPGPAMASHKDDEEKFFPQSGVLIFGKQGSEKTNVDIEKVMITDEEEIRTTNPVATEQYGSVSTNLQRGNLANHNNTTNARQAATADVNTQGVLPGMVWQDRDVYLQGPIWAKIPHTDGHFHPSPLMGGFGLKHPPPQILIKNTPVPANPSTTFSAAKFASFITQYSTGQVSVEIEWELQKENSKRWNPEIQYTSNYNKSINVDFTVDTNGVYSEPRPIGTRYL

SEQ ID NO: 541 - protein, 730 aa, unidentified
  source 1..730: note = Adeno-associated virus 2
MASDGYLPDWLEDNLSEGIREWWDLKPGAPKPKANQQKQDDGRGLVLPGYKYLGPFNGLDKGEPVNAADAAALEHDKAYDQQLKAGDNPYLRYNHADAEFQERLQEDTSFGGNLGRAVFQAKKRVLEPFGLVEEGAKTAPGKKRPVEQSPQEPDSSSGIGKTGQQPAKKRLNFGQTGDSESVPDPQPLGEPPATPAAVGPTTMASGGGAPMADNNEGADGVGNASGNWHCDSTWLGDRVITTSTRTWALPTYNNHLYKQISSASTGASNDNHYFGYSTPWGYFDFNRFHCHFSPRDWQRLINNNWGFRPKRLNFKLFNIQVKEVTTNDGVTTIANNLTSTVQVFSDSEYQLPYVLGSAHQGCLPPFPADVFMIPQYGYLTLNNGSQAVGRSSFYCLEYFPSQMLRTGNNFTFSYTFEDVPFHSSYAHSQSLDRLMNPLIDQYLYYLNRTQNQSGSAQNNDLLFSRGSPAGMSVQPKNWLPGPCYRQQRVSKTKTDNNNSNFTWTGASKYNLNGRESIINPGTAMASHKDDKDKFFPMSGVMIFGKESAGASNTALDNVMITDEEEIKATNPVATERFGTVAVNLQSSSTDPATGDVHVMGALPGMVWQDRDVYLQGPIWAKIPHTDGHFHPSPLMGGFGLKNPPPQILIKNTPVPANPPAEFSATKFASFITQYSTGQVSVEIEWELQKENSKRWNPEVQYTSNYAKSANVDFTVDNNGLYTEPRPIGTR

SEQ ID NO: 542 - protein, 735 aa, unidentified
  source 1..735: note = Adeno-associated virus 2
  VARIANT 239: note = MOD_RES - Any amino acid
MASDGYLPDWLEDNLSEGIREWWDLKPGAPKPKANQQKQDDGRGLVLPGYKYLGPFNGLDKGEPVNAADAAALEHDKAYDQQLKAGDNPYLRYNHADAEFQERLQEDTSFGGNLGRAVFQAKKRVLEPFGLVEEGAKTAPGKKRPVEQSPQEPDSSSGIGKTGQQPAKKRLNFGQTGDSESVPDPQPLGEPPATPAAVGPTTMASGGGAPMADNNEGADGVGNASGNWHCDSTWLGDRXITTSTRTWALPTYNNHLYKQISSASTGASNDNHYFGYSTPWGYFDFNRFHCHFSPRDWQRLINNNWGFRPKRLNFKLFNIQVKEVTTNDGVTTIANNLTSTVQVFSDSEYQLPYVLGSAHQGCLPPFPADVFMIPQYGYLTLNNGSQAVGRSSFYCLEYFPSQMLRTGNNFTFSYTFEDVPFHSSYAHSQSLDRLMNPLIDQYLYYLNRTQNQSGSAQNNDLLFSRGSPAGMSVQPKNWLPGPCYRQQRVSKTKTDNNNSNFTWTGASKYNLNGRESIINPGTAMASHKDDKDKFFPMSGVMIFGKESAGASNTALDNVMITDEEEIKATNPVATERFGTVAVNLQSSSTDPATGDVHVMGALPGMVWQDRDVYLQGPIWAKIPHTDGHFHPSPLMGGFGLKNPPPQILIKNTPVPANPPAEFSATKFASFITQYSTGQVSVEIEWELQKENSKRWNPEVQYTSNYAKSANVDFTVDNNGLYTEPRPIGTRYLTRP

SEQ ID NO: 543 - protein, 733 aa, unidentified
  source 1..733: note = Adeno-associated virus 2
MASDGYLPDWLEDNLSEGIREWWDLKPGAPKPKANQQKQDDGRGLVLPGYKYLGPFNGLDKGEPVNAADAAALEHDKAYDQQLKAGDNPYLRYNHADAEFQERLQEDTSFGGNLGRAVFLAKKRVLEPFGLVEEGAKTAPGKKRPVEQSPQEPDSSSGIGKTGQQPAKKRLNFGQTGDSESVPDPQPLGEPPATPAAVGPTTMASGGGAPMADNNEGADGVGNASGNWHCDSTWLGDRVITTSTRTWALPTYNNHLYKQISSASTGASNDNHYFGYSTPWGYFDFNRFHCHFSPRDWQRLINNNWGFRPKRLNFKLFNIQVKEVTTNDGVTTIANNLTSTVQVFSDSEYQLPYVLGSAHQGCLPPFPADVFMIPQYGYLTLNNGSQAVGRSSFYCLEYFPSQMLRTGNNFTFSYTFEDVPFHSSYAHSQSLDRLMNPLIDQYLYYLNRTQNQSGSAQNNDLLFSRGSPAGMSVQPKNWLPGPCYRQQRVSKTKTDNNNSNFTWTGASKYNLNGRESIINPGTAMASHKDDKDKFFPMSGVMIFGKESAGASNTALDNVMITDEEEIKATNPVATERFGTVAVNLQSSSTDPATGDVHVMGALPGMVWQDRDVYLQGPIWAKIPHTDGHFHPSPLMGGFGLKNPPPQILIKNTPVPANPPAEFSATKFASFITQYSTGQVSVEIEWELQKENSKRWNPEVQYTSNYAKSANVDFTVDNNGLYTEPRPIGTRYLT

SEQ ID NO: 544 - protein, 734 aa, unidentified
  source 1..734: note = Adeno-associated virus 2
MAADGYLPDWLEDTLSEGIRQWWKLKPGPPPPKPAERHKDDSRGLVLPGCKYLGPFNGLDKGEPVNEADAAALEHDKAYDRQLDSGDNPYLKYNHADAEFQERLKEDTSFGGNLGRAVFQAKKRVLEPLGLVEEPVKTAPGKKRPVEHSPVEPDSSSGTGKAGQQPARKRLNFGQTGDADSVPDPQPLGQPPAAPSGLGTNTMATGSGAPMADNNEGADGVGNSSGNWHCDSTWMGDRVITTSTRTWALPTYNNHLYKQISSQSGASNDNHYFGYSTPWGYFDFNRFHCHFSPRDWQRLINNNWGFRPKRLNFKLFNIQVKEVTQNDGTTTIANNLTSTVQVFSDSEYQLPYVLGSAHQGCLPPFPADVFMIPQYGYLTLNNGSQAVGRSSFYCLEYFPSQMLRTGNNFTFNYTFEDVPFHSSYAHSQSLDRLMNPLIDQYLYYLNRTQNQSGSAQNNDLLFSRGSPAGMSVQPKNWLPGPCYRQQRVSKTKTDNNNSNFTWTGASKYNLNGRESIINPGTAMASHKDDKDKFFPMSGVMIFGKESAGASNTALDNVMITDEEEIKATNPVATERFGTVAVNLQSSSTDPATGDVHVMGALPGMVWQDRDVYLQGPIWAKIPHTDGHFHPSPLMGGFGLKNPPPQILIKNTPVPANPPAEFSATKFASFITQYSTGQVSVEIEWELQKENSKRWNPEVQYTSNYAKSANVDFTVDNNGLYTEPRPIGTRYLTRP

SEQ ID NO: 545 - protein, 734 aa, unidentified
  source 1..734: note = Adeno-associated virus 2
MAADGYLPDWLEDTLSEGIRQWWKLKPGPPPPKPAERHKDDSRGLVLPGYKYLGPFNGLDKGEPVNEADAAALEHDKAYDRQLDSGDNPYLKYNHADAEFQERLKEDTSFGGNLGRAVFQAKKRVLEPLGLVEEPVKTAPGKKRPVEHSPVEPDSSSGTGKAGQQPARKRLNFGQTGDADSVPDPQPLGQPPAAPSGLGTNTMATGSGAPMADNNEGADGVGNSSGNWHCDSTWMGDRVITTSTRTWALSTYNNHLYKQISSQSGASNDNHYFGYSTPWGYFDFNRFHCHFSPRDWQRLINNNWGFRPKRLNFKLFNIQVKEVTQNDGTTTIANNLTSTVQVFTDSEYQLPYVLGSAHQGCLPPFPADVFMVPQYGYLTLNNGSQAVGRSSFYCLEYFPSQMLRTGNNFTFSYTFEDVPFHSSYAHSQSLDRLMNPLIDQYLYYLSRTNTPSGTTTQSRLQFSQAGASDIRDQSRNWLPGPCYRQQRVSKTSADNNNSEYSWTGATKYHLNGRDSLVNPGPAMASHKDDEEKFFPQSGVLIFGKQGSEKTNVDIEKVMITDEEEIRTTNPVATEQYGSVSTNLQRGNRQAATADVNTQGVLPGMVWQDRDVYLQGPIWAKIPHTDGHFHPSPLMGGFGLKHPPPQILIKNTPVPANPSTTFSAAKFASFITQYSTGQVSVEIEWELQKENSKRWNPEIQYTSNYNKSINVDFTVDTNGVYSEPRPIGTRYLTRN

SEQ ID NO: 546 - protein, 738 aa, unidentified
  source 1..738: note = Adeno-associated virus 2
MAADGYLPDWLEDTLSEGIRQWWKLKPGPPPPKPAERHKDDSRGLVLPGYKYLGPFNGLDKGEPVNEADAAALEHDKAYDRQLDGGDNPYLKYNHADAEFQERLKEDTSFGGNLGRAVFQAKKRVLEPLGLVEEPVKTAPGKKRPVEHSPVEPDSSSGTGKAGQQPARKRLNFGQTGDADSVPDPQPLGQPPAAPSGLGTNTMATGSGAPMADNNEGADGVGNSSGNWHCDSTWMGDRVITTSTRTWALPTYNNHLYKQISSQSGASNDNHYFGYSTPWGYFDFNRFHCHFSPRDWQRLINNNWGFRPKRLNFKLFNIQVKEVTQNDGTTTIANNLTSTVQVFTDSEYQLPYVLGSAHQGCLPPFPADVFMVPQYGYLTLNNGSQAVGRSSFYCLEYFPSQMLRTGNNFTFSYTFEDVPFHSSYAHSQSLDRLMNPLIDQYLYYLSRTNTPSGTTTQSGLQFSQAGASDIRDQSRNWLPGPCYRQQRVSKTSADNNNSEYSWTGATKYHLNGRDSLVNPGPAMASHKDDEEKFFPQSGVLIFGKQGSEKTNVDIEKVMITDEEEIRTTNPVATEQYGSVSTNLQRGNRQAATADVNTQGVLPGMVWQDRDVYLQGPIWAKIPHTDGHFHPSPLMGGFGLKHPPPQILIKNTPVPANPSTTFSAAKFASFITQYSTGQVSVEIEWELQKENSKRWNPEIQYTSNYNKSVNVDFTVDTNGVYSEPRPIGTRYLTRNLLRP

SEQ ID NO: 547 - DNA, 2208 bp, unidentified
  source 1..2208: mol_type = unassigned DNA; note = Adeno-associated virus
atggctgccgatggttatcttccagattggctcgaggacactctctctgaaggaataagacagtggtggaagctcaaacctggcccaccaccaccaaagcccgcagagcggcataaggacgacagcaggggtcttgtgcttcctgggtacaagtacctcggacccttcaacggactcgacaagggggagccggtcaacgaggcagacgccgcggccctcgagcacgacaaggcctacgaccggcagctcgacagcggagacaacccgtacctcaagtacaaccacgccgacgcagagtttcaggagcgccttaaagaagatacgtcttttgggggcaacctcggacgagcagtcttccaggcgaaaaagagggttcttgaacctctgggcctggttgaggaacctgttaagacggctccgggaaaaaagaggccggtagagcactctcctgtggagccagactcctcctcgggaaccggaaaagcgggccagcagcctgcaagaaaaagattaaattttggtcagactggagacgcagactccgtacctgacccccagcctctcggacagccaccagcagccccctctggtctgggatctactacaatggctacaggcagtggcgcaccaatggcagacaataacgagggtgccgatggagtgggtaattcctcaggaaattggcattgcgattcccaatggctgggcgacagagtcatcaccaccagcacccgaacctgggccctgcccacatacaacaaccacctctacaagcaaatctccagccaatcaggagccagcaacgacaaccactactttggctacagcaccccctgggggtattttgacttcaacagattccactgccacttttcaccacgtgactggcaaagactcatcaacaacaactggggattccggcccaaaagactcaacttcaagctctttaatattcaagtcaaagaggtcacgcagaatggcggtacgacgacgattgccaataaccttaccagcacggttcaggtgtttactgactcggagtaccagctcccgtacgtcctgggctcggcgcatcaaggatgcctcccgccgtttccagcggacgtcttcatggtcccacagtatggatacctcaccctgaacaacgggagtcaggcggtaggacgctcttccttttactgcctggagtactttccttctcagatgctgcgtactggaaacaactttcagttcagctacacttttgaagacgtgcctttccacagcagctacgctcacagccagagtctggatcggctgatgaatcctctgatcgaccagtacctgtattatctgaacaagacacaaacaaatagtggaactcttcagcagtctcggctactgtttagccaagctggaccaaccaacatgtctcttcaagctaaaaactggctgcctggaccttgctacagacagcagcgtctgtcaaaacaggcaaacggcaacaacaacagcaactttccctggactgcagctacaaagtatcatctaaatggccgggactcgttggttaatccaggaccagctatggccagtcacaaggatgacgaagaaaagtttttccccatgcatggaaccctgatatttggtaaacaaggaacaaatgccaacgacgcggatttggaaaatgtcatgattacagatgaagaagaaatcagggccaccaatcccgtggctacggagcagtacgggactgtgtcaaataatttgcaaaactcaaacactggtccaactactggaactgtcaatcaccaaggagcgttacctggtatggtgtggcaggatcgagacgtgtacctgcagggacccatttgggccaagattcctcacaccgatggacactttcatccttctccactgacgggaggttttggactcaaacacccgcctcctcagatcatgatcaaaaacactcccgttccagccaatcctcccacaaacttcagttctgccaagtttgcttctttcatcacacagtattccacgggacaggtcagcgtggagatcgagtgggagctgcagaaggagaacagcaaacgctggaatcccgaaattcagtacacttccaactacaacaagtctgttaatgtggactttactgtggacactaatggtgtgtattcagagcctcgccccattggcaccagatacctgactcgtaatctgtaa

SEQ ID NO: 548 - protein, 735 aa, unidentified
  source 1..735: note = Adeno-associated virus
MAADGYLPDWLEDTLSEGIRQWWKLKPGPPPPKPAERHKDDSRGLVLPGYKYLGPFNGLDKGEPVNEADAAALEHDKAYDRQLDSGDNPYLKYNHADAEFQERLKEDTSFGGNLGRAVFQAKKRVLEPLGLVEEPVKTAPGKKRPVEHSPVEPDSSSGTGKAGQQPARKRLNFGQTGDADSVPDPQPLGQPPAAPSGLGSTTMATGSGAPMADNNEGADGVGNSSGNWHCDSQWLGDRVITTSTRTWALPTYNNHLYKQISSQSGASNDNHYFGYSTPWGYFDFNRFHCHFSPRDWQRLINNNWGFRPKRLNFKLFNIQVKEVTQNGGTTTIANNLTSTVQVFTDSEYQLPYVLGSAHQGCLPPFPADVFMVPQYGYLTLNNGSQAVGRSSFYCLEYFPSQMLRTGNNFQFSYTFEDVPFHSSYAHSQSLDRLMNPLIDQYLYYLNKTQTNSGTLQQSRLLFSQAGPTNMSLQAKNWLPGPCYRQQRLSKQANGNNNSNFPWTAATKYHLNGRDSLVNPGPAMASHKDDEEKFFPMHGTLIFGKQGTNANDADLENVMITDEEEIRATNPVATEQYGTVSNNLQNSNTGPTTGTVNHQGALPGMVWQDRDVYLQGPIWAKIPHTDGHFHPSPLTGGFGLKHPPPQIMIKNTPVPANPPTNFSSAKFASFITQYSTGQVSVEIEWELQKENSKRWNPEIQYTSNYNKSVNVDFTVDTNGVYSEPRPIGTRYLTRNL

SEQ ID NO: 549 - DNA, 2208 bp, unidentified
  source 1..2208: mol_type = unassigned DNA; note = Adeno-associated virus
atggctgccgatggttatcttccagattggctcgaggacactctctctgaaggaataagacagtggtggaagctcaaacctggcccaccaccaccaaagctcgcagagcggcatcaggacgacagcaggggtcttgtgcttcctgggtacaagtacctcggacccttcaacggactcgacaaaggagagccggtcaacgaggcagacgccgcggccctcgagcacgacaaggcctacgaccggcagctcgacagcggagacaacccgtacctcaagtacaaccacgccgacgcggagtttcaggagcgtcttaaagaagatacgtcttttgggggcaacctcggacgagcagtcttccaggcgaaaaagagggttcttgaacctctgggcctggttgaggaacctgttaagacggctccgggaaaaaagaggccggtagagcactctcctgtggagccagactcctcctcgggaaccggaaaggcgggccatcagcctgcgagaaagagattgaattttggtcagactggagacgcagactccgtacctgacccccagcctctcggacagccaccagcagcccccacaagtctgggatctactacaatggctacaggcagtggcgcaccaatggcagacaataacgagggtgccgatggagtgggtaattcctcaggaaattggcattgcgattcccaatggctgggcgacagagtcatcaccaccagcacccgaacctgggccctgcccacctacaacaaccacctctacaagcaaatctccagccaatcaggagcctcgaacgacaaccactactttggctacagcaccccctgggggtattttgacttcaacagattccactgtcacttctccccacgtgattggcaaagactcatcaacaacaactggggattccgacccaagagactcaacttcaagctctttaacattcaagtcaaagaggtcacgcagaatgacggtacgacgacgattgccaataaccttaccagcacggttcaggtgtttactgactcggagtaccagctcccgtacgtcctcggctcggcgcatcaaggatgcctcccgccgtttccagcggacgtcttcacggtcccacagtatggatacctcaccctgaacaacgggagtcaggcggtaggacgctcttccttttactgcctggagtactttccttctcagatgctgcgtactggaaacaaccttaccttcagctacacctttgaggacgttcctttccacagcagctacgctcacagccagagtttggaccggctgatgaatcctctgatcgaccagtatctatattatctgaacaggacacaatcaaatagtggaactcttcagcagtctaggctactgtttagccaagctggacccaccagcatgtctcttcaagctaaaaactggctgcctggaccttgctacagacagcagcgtctttcaaagcaggcaaacgacaacaacaacagcaactttccctggactgcggctacaaagtatcatctaaatggccgggactcgttggttaatccaggaccagctatggccagccacaaagacgatgaagaaaagtttttccccatgcatggaaccctgatatttggtaaacaaggaacaaatgctaacgacgcggatttggagcatgttatgattacagatgaagaagaaatcaggaccaccaatcctgtggctacagagcagtacggaaacgtgtcaaataatttgcaaaactcaaatactggtccaactacagaaaatgtcaatcaccagggagcgttacctggtatggtgtggcaggatcgagacgtgtacctgcagggacccatttgggccaagattcctcacaccgacggacactttcacccttctccactgatgggaggttttggactcaaacacccgcctcctcaaatcatgatcaaaaacactcccgttccagccaatcctcccacaaactacagttctgccaagtttgcttctttcatcacacagtattccacgggccaggtcagcgtggagattgagtgggagctgcggaaggagaacagcaaacgctggaaccccgagatccagtatacttccaactacaacaaatctgttaatgtggactttactgtggacactaatggtgtgtattcagagcctcgccccattggcaccagatacctgactcgtaatctgtaa

SEQ ID NO: 550 - protein, 735 aa, unidentified
  source 1..735: note = Adeno-associated virus
MAADGYLPDWLEDTLSEGIRQWWKLKPGPPPPKLAERHQDDSRGLVLPGYKYLGPFNGLDKGEPVNEADAAALEHDKAYDRQLDSGDNPYLKYNHADAEFQERLKEDTSFGGNLGRAVFQAKKRVLEPLGLVEEPVKTAPGKKRPVEHSPVEPDSSSGTGKAGHQPARKRLNFGQTGDADSVPDPQPLGQPPAAPTSLGSTTMATGSGAPMADNNEGADGVGNSSGNWHCDSQWLGDRVITTSTRTWALPTYNNHLYKQISSQSGASNDNHYFGYSTPWGYFDFNRFHCHFSPRDWQRLINNNWGFRPKRLNFKLFNIQVKEVTQNDGTTTIANNLTSTVQVFTDSEYQLPYVLGSAHQGCLPPFPADVFTVPQYGYLTLNNGSQAVGRSSFYCLEYFPSQMLRTGNNLTFSYTFEDVPFHSSYAHSQSLDRLMNPLIDQYLYYLNRTQSNSGTLQQSRLLFSQAGPTSMSLQAKNWLPGPCYRQQRLSKQANDNNNSNFPWTAATKYHLNGRDSLVNPGPAMASHKDDEEKFFPMHGTLIFGKQGTNANDADLEHVMITDEEEIRTTNPVATEQYGNVSNNLQNSNTGPTTENVNHQGALPGMVWQDRDVYLQGPIWAKIPHTDGHFHPSPLMGGFGLKHPPPQIMIKNTPVPANPPTNYSSAKFASFITQYSTGQVSVEIEWELRKENSKRWNPEIQYTSNYNKSVNVDFTVDTNGVYSEPRPIGTRYLTRNL

SEQ ID NO: 551 - DNA, 2208 bp, unidentified
  source 1..2208: mol_type = unassigned DNA; note = Adeno-associated virus
atggctgccgatggttatcttccagattggctcgaggacactctctctgaaggaataagacagtggtggaagctcaaacctggcccaccaccaccaaagcccgcagagcggcatcaggacgacagcaggggtcttgtgcttcctgggtacaagtacctcggacccttcaacggactcgacaaaggagagccggtcaacgaggcagacgccgcggccctcgagcacgacaaggcctacgaccggcagctcgacagcggagacaacccgtacctcaagtacaaccacgccgacgcggagtttcaggagcgtcttaaagaagatacgtcttttgggggcaacctcggacgagcagtcttccaggcgaaaaagagggttcttgaacctctgggcctggttgaggaacctgttaagacggctccgggaaaaaagaggccggtagagcactctcctgtggagccagactcctcctcgggaaccggaaaagcgggccatcagcctgcgagaaagagattgaattttggtcagactggagacgcagactccgtacctgacccccagcctctcggacagccaccagcagcccccacaagtttgggatctactacaatggctacaggcagtggcgcaccaatggcagacaataacgagggtgccgatggagtgggtaattcctcaggaaattggcattgcgattcccaatggctgggcgacagagtcatcaccaccagcacccgaacctgggccctgcccacctacaacaaccacctctacaagcaaatctccagccaatcaggagcctcgaacgacaaccactactttggctacagcaccccctgggggtattttgacttcaacagattccactgtcacttctccccacgtgattggcaaagactcatcaacaacaactggggattccgacccaagagactcaacttcaagctctttaacattcaagtcaaggaggtcacgcagaatgacggtacgacgacgattgccaataaccttaccagcacggttcaggtgtttactgactcggagtaccagctcccgtacgtcctcggctcggcgcatcaaggatgcctcccgccgtttccagcggacgtcttcatggtcccacagtatggatacctcaccctgaacaacgggagtcaggcggtaggacgctcttccttttactgcctggagtactttccttctcagatgctgcgtactggaaacaactttaccttcagctacacctttgaggacgttcctttccacagcagctacgctcacagccagagtttggaccggctgatgaatcctctgatcgaccagtatctatattatctgaacaggacacaatcaaatagtggaactcttcagcagtctaggctactgtttagccaagctggacccaccagcatgtctcttcaagctaaaaactggctgcctggaccttgctacagacagcagcgtctttcaaagcaggcaaacgacaacaacaacagcaactttccctggactgcggctacaaagtatcgtctaaatggccgggactcgttggttaatccaggaccagctatggccagccacaaagacgatgaagaaaagtttttccccatgcatggaaccctgatatttggtaaacaaggaacaaatgctaacgacgcggatttggagcatgttatgattacagatgaagaagaaatcaggaccaccaatcctgtggctacagagcagtacggaaacgtgtcaaataatttgcaaaactcaaatactggtccaactacagaaaatgtcaatcaccagggagcgttacctggtatggtgtggcaggatcgagacgtgtacctgcagggacccatttgggccaagattcctcacaccgacggacactttcacccttctccactgatgggaggttttggactcaaacacccgcctcctcaaatcatgatcaaaaacactcccgttccagccaatcctcccacaaacttcagttctgccaagtttgcttctttcatcacacagtattccacgggccaggtcagcgtggagattgagtgggagctgcagaaggagaacagcaaacgctggaaccccgagatccagtatacttccaactacaacaaatctgttaatgtggactttactgtggacactaatggtgtgtattcagagcctcgccccattggcaccagatacctgactcgtaatctgtaa

SEQ ID NO: 552 - protein, 735 aa, unidentified
  source 1..735: note = Adeno-associated virus
MAADGYLPDWLEDTLSEGIRQWWKLKPGPPPPKPAERHQDDSRGLVLPGYKYLGPFNGLDKGEPVNEADAAALEHDKAYDRQLDSGDNPYLKYNHADAEFQERLKEDTSFGGNLGRAVFQAKKRVLEPLGLVEEPVKTAPGKKRPVEHSPVEPDSSSGTGKAGHQPARKRLNFGQTGDADSVPDPQPLGQPPAAPTSLGSTTMATGSGAPMADNNEGADGVGNSSGNWHCDSQWLGDRVITTSTRTWALPTYNNHLYKQISSQSGASNDNHYFGYSTPWGYFDFNRFHCHFSPRDWQRLINNNWGFRPKRLNFKLFNIQVKEVTQNDGTTTIANNLTSTVQVFTDSEYQLPYVLGSAHQGCLPPFPADVFMVPQYGYLTLNNGSQAVGRSSFYCLEYFPSQMLRTGNNFTFSYTFEDVPFHSSYAHSQSLDRLMNPLIDQYLYYLNRTQSNSGTLQQSRLLFSQAGPTSMSLQAKNWLPGPCYRQQRLSKQANDNNNSNFPWTAATKYRLNGRDSLVNPGPAMASHKDDEEKFFPMHGTLIFGKQGTNANDADLEHVMITDEEEIRTTNPVATEQYGNVSNNLQNSNTGPTTENVNHQGALPGMVWQDRDVYLQGPIWAKIPHTDGHFHPSPLMGGFGLKHPPPQIMIKNTPVPANPPTNFSSAKFASFITQYSTGQVSVEIEWELQKENSKRWNPEIQYTSNYNKSVNVDFTVDTNGVYSEPRPIGTRYLTRNL

SEQ ID NO: 553 - DNA, 2208 bp, unidentified
  source 1..2208: mol_type = unassigned DNA; note = Adeno-associated virus
atggctgccgatggttatcttccagattggctcgaggacactctctctgaaggaataagacagtggtggaagctcaaacctggcccaccaccaccaaagcccgcagagcggcatcaggacgacagcaggggtcttgtgcttcctgggtacaagtacctcggacccttcaacggactcgacaaaggagagccggtcaacgaggcagacgccgcggccctcgagcacgacaaggcctacgaccggcagctcgacagcggagacaacccgtacctcaagtacaaccacgccgacgcggagtttcaggagcgtcttaaagaagatacgtcttttgggggcaacctcggacgagcagtcttccaggcgaaaaagagggttcttgaacctctgggcctggttgaggaacctgttaagacggctccgggaaaaaagaggccggtagagcactctcctgtggagccagactcctcctcgggaaccggaaaagcgggccatcagcctgcgagaaagagattgaattttggtcagactggagacgcagactccgtacctgacccccagcctctcggacagccaccagcagcccccacaagtttgggatctactacaatggctacaggcagtggcgcaccaatggcagacaataacgagggtgccgatggagtgggtaattcctcaggaaattggcattgcgattcccaatggctgggcgacagagtcatcaccaccagcacccgaacctgggccctgcccacctacaacaaccacctctacaagcaaatctccagccaatcaggagcctcgaacgacaaccactactttggctacagcaccccctgggggtattttgacttcaacagattccactgtcacttctccccacgtgattggcaaagactcatcaacaacaactggggattccgacccaagagactcaacttcaagctctttaacattcaagtcaaagaggtcacgcagaatgacggtacgacgacgattgccaataaccttaccagcacggttcaggtgtttactgactcggagtaccagctcccgtacgtcctcggctcggcgcatcaaggatgcctcccgccgtttccagcggacgtcttcatggtcccacagtatggatacctcaccctgaacaacgggagtcaggcggtaggacgcccttccttttactgcctggagtactttccttctcagatgctgcgtactggaaacaactttaccttcagctacacctttgaggacgttcctttccacagcagctacgctcacagccagagtttggaccggctgatgaatcctctgatcgaccagtatctatattatctgaacaggacacaatcaaatagtggaactcttcagcagtctaggctactgtttagccaagctggacccaccagcatgtctcttcaagctaaaaactggctgcctggaccttgctacagacagcagcgtctttcaaagcaggcaaacgacaacaacaacagcaactttccctggactgcggctacaaagtatcatctaaatggccgggactcgttggttaatccaggaccagctatggccagccacaaagacgatgaagaaaagtttttccccatgcatgggaccctgatatttggtaaacaaggaacaaatgctaacgacgcggatttggagcatgttatgattacagatgaagaagaaatcaggaccaccaatcctgtggctacagagcagtacggaaacgtgtcaaataatttgcaaaactcaaatactggtccaactacagaaaatgtcaatcaccagggagcgttacctggtatggtgtggcaggatcgagacgtgtacctgcagggacccatttgggccaagattcctcacaccgacggacactttcacccttctccactgatgggaggttttggactcaaacacccgcctcctcaaatcatgatcaaaaacactcccgttccagccaatcctcccacaaacttcagttctgccaagtttgcttctttcatcacacagtattccacgggccaggtcagcgtggagattgagtgggagctgcagaaggagaacagcaaacgctggaaccccgagatccagtatacttccaactacaacaaatctgttaatgtggactttactgtggacactaatggtgtgtattcagagcctcgccccattggcaccagatacctgactcgtaatctgtaa

SEQ ID NO: 554 - protein, 735 aa, unidentified
  source 1..735: note = Adeno-associated virus
MAADGYLPDWLEDTLSEGIRQWWKLKPGPPPPKPAERHQDDSRGLVLPGYKYLGPFNGLDKGEPVNEADAAALEHDKAYDRQLDSGDNPYLKYNHADAEFQERLKEDTSFGGNLGRAVFQAKKRVLEPLGLVEEPVKTAPGKKRPVEHSPVEPDSSSGTGKAGHQPARKRLNFGQTGDADSVPDPQPLGQPPAAPTSLGSTTMATGSGAPMADNNEGADGVGNSSGNWHCDSQWLGDRVITTSTRTWALPTYNNHLYKQISSQSGASNDNHYFGYSTPWGYFDFNRFHCHFSPRDWQRLINNNWGFRPKRLNFKLFNIQVKEVTQNDGTTTIANNLTSTVQVFTDSEYQLPYVLGSAHQGCLPPFPADVFMVPQYGYLTLNNGSQAVGRPSFYCLEYFPSQMLRTGNNFTFSYTFEDVPFHSSYAHSQSLDRLMNPLIDQYLYYLNRTQSNSGTLQQSRLLFSQAGPTSMSLQAKNWLPGPCYRQQRLSKQANDNNNSNFPWTAATKYHLNGRDSLVNPGPAMASHKDDEEKFFPMHGTLIFGKQGTNANDADLEHVMITDEEEIRTTNPVATEQYGNVSNNLQNSNTGPTTENVNHQGALPGMVWQDRDVYLQGPIWAKIPHTDGHFHPSPLMGGFGLKHPPPQIMIKNTPVPANPPTNFSSAKFASFITQYSTGQVSVEIEWELQKENSKRWNPEIQYTSNYNKSVNVDFTVDTNGVYSEPRPIGTRYLTRNL

SEQ ID NO: 555 - DNA, 2208 bp, unidentified
  source 1..2208: mol_type = unassigned DNA; note = Adeno-associated virus
atggctgccgatggttatcttccagattggctcgaggacactctctctgaaggaataagacagtggtggaagctcaaacctggcccaccaccaccaaagcccgcagagcggcataaggacgacagcaggggtcttgtgcttcctgggtacaagtacctcggacccttcaacggactcgacaagggagagccggtcaacgaggcagacgccgcggccctcgagcacgacaaggcctacgaccggcagctcgacagcggagacaacccgtacctcaagtacaaccacgccgacgcggagtttcaggagcgccttaaagaagatacgtcttttgggggcaacctcggacgagcagtcttccaggcaaaaaagagggttcttgaacctctgggcctggttgaggagcctgttaaaacggctccgggaaaaaagaggccggtagagcactctcctgcggagccagactcctcctcgggaaccggaaaagcgggccagcagcctgcaagaaaaagattgaatttcggtcagactggagacgcagactccgtacctgacccccagcctctcggacagccaccagcagccccctctggtctgggaactaatacgatggcttcaggcagtggcgcaccaatggcagacaataacgagggcgccgacggagtgggtaattcctcgggaaattggcattgcgattccacatggatgggcgacagagtcatcaccaccagcacccgaacttgggccctgcccacctacaacaaccatctctacaagcaaatctccagccaatcaggagccagcaacgacaaccactactttggctacagcaccccttgggggtattttgacttcaacagattccactgccacttttcaccacgtgactggcaaagactcatcaacaacaactggggattccggcccaagagactcaacttcaagctctttaacattcaagtcaaagaggtcacgcagaatgacggtacgacgacgattgccaataaccttaccagcacggttcaggtgtttactgactcggagtaccagctcccgtacgtcctcggctcggcgcatcaaggatgcctcccgccgttcccagcagacgtcttcatggtgccacagtatggatacctcaccctgaacaacgggagtcaggcagtaggacgctcttcattttactgcctggagtactttccttctcagatgctgcgtaccggaaacaactttaccttcagctacacctttgaggacgttcctttccacagcagctacgctcacagccagagtttggaccgtctcatgaatcctctcatcgaccagtacctgtattacttgagcagaacaaacactccaagcggaaccaccacgcagtccaggcttcagttttctcaggccggagcaagtgacattcgggaccagtctaggaactggcttcctggaccctgttaccgccagcagcgagtatcaaagacatctgcggataacaacaacagtgaatactcgtggactggagctaccaagtaccacctcaatggcagagactctctggtgaatccgggcccggccatggccagccacaaggacgatgaagaaaagttttttcctcagagcggggttctcatctttgggaagcaaggctcagagaaaacaaatgtggacattgaaaaggtcatgattacagacgaagaggaaatcaggaccaccaatcccgtggctacggagcagtatggttctgtatctaccaacctgcagggcggcaacacacaagcagctaccgcagatgtcaacacacaaggcgttcttccaggcatggtctggcaggacagagacgtgtacctgcaggggcccatctgggcaaagattccacacacggacggacattttcacccctctcccctcatgggcggattcggacttaaacaccctcctccacagattctcatcaagaacaccccggtacctgcgaatccttcgaccaccttcagtgcggcaaagtttgcttctttcatcacacagtattccacggggcaggtcagcgtggagatcgagtgggagctgcagaaggagaacagcaaacgctggaatcccgagatccagtacacttccaactacaacaaatctgttaatgtggactttactgttgacactaatggcgtgtattcagagcctcgccccattggcaccagatacctgactcgtaatctgtaa

SEQ ID NO: 556 - protein, 735 aa, unidentified
  source 1..735: note = Adeno-associated virus
MAADGYLPDWLEDTLSEGIRQWWKLKPGPPPPKPAERHKDDSRGLVLPGYKYLGPFNGLDKGEPVNEADAAALEHDKAYDRQLDSGDNPYLKYNHADAEFQERLKEDTSFGGNLGRAVFQAKKRVLEPLGLVEEPVKTAPGKKRPVEHSPAEPDSSSGTGKAGQQPARKRLNFGQTGDADSVPDPQPLGQPPAAPSGLGTNTMASGSGAPMADNNEGADGVGNSSGNWHCDSTWMGDRVITTSTRTWALPTYNNHLYKQISSQSGASNDNHYFGYSTPWGYFDFNRFHCHFSPRDWQRLINNNWGFRPKRLNFKLFNIQVKEVTQNDGTTTIANNLTSTVQVFTDSEYQLPYVLGSAHQGCLPPFPADVFMVPQYGYLTLNNGSQAVGRSSFYCLEYFPSQMLRTGNNFTFSYTFEDVPFHSSYAHSQSLDRLMNPLIDQYLYYLSRTNTPSGTTTQSRLQFSQAGASDIRDQSRNWLPGPCYRQQRVSKTSADNNNSEYSWTGATKYHLNGRDSLVNPGPAMASHKDDEEKFFPQSGVLIFGKQGSEKTNVDIEKVMITDEEEIRTTNPVATEQYGSVSTNLQGGNTQAATADVNTQGVLPGMVWQDRDVYLQGPIWAKIPHTDGHFHPSPLMGGFGLKHPPPQILIKNTPVPANPSTTFSAAKFASFITQYSTGQVSVEIEWELQKENSKRWNPEIQYTSNYNKSVNVDFTVDTNGVYSEPRPIGTRYLTRNL

SEQ ID NO: 557 - DNA, 3161 bp, unidentified
  source 1..3161: mol_type = unassigned DNA; note = Adeno-associated virus
gattgaatttagcggccgcgaattcgcccttgctgcgtcaactggaccaatgagaactttccattcaatgattgcgtcgacaagatggtgatctggtgggaggagggaaagatgaccgccaaggtcatggagtcggccaaagccattctcggaggaagcaaggtgcgcgtggaccagaaatgtaagtcctcggcccagatagacccgactcccgtgattgtcacctccaacaccaacatgtgcgccgtgattgacgggaactcaacgaccttcgagcaccagcagccgttgcaagaccggatgttcaaatttgaactcacccgccgtctggatcatgactttgggaaggtcaccaagcaggaagtcaaagactttttccggtgggcaaaggatcacgtggttgaggtggagcatgaattctacgtcaaaaagggtggagccaagaaaagacccgcccccagtgacgcagatataagtgagcccaaacgggcgcgcgggtcagttgcgcagccatcgacgtcagacgcggaagcttcgatcaactacgcggacaggtaccaaaacaaatgttctcgtcacgtgggcatgaatctgatgctgtttccctgcagacaatgcgagagaatgaatcaaaattcaaatatctgcttcactcacggacagaaggactgtttagagtgctttcccgtgtcagaatctcaacccgtttctgtcgtcaaaaaggcgtatcagaaactttgctacattcatcatatcatgggaaaggtgccagacgcttgcactgcctgcgatctggtcaatgtggatttggatgactgcatctctgaacaataaatgatttaaatcaggtatggctgccgatggttatcttccagattggctcaaggacactctctctgaaggaataagacagtggtggaagctcaaacctggcccaccaccaccaaagcccgcagagcggcataaggacgacagcgggggtcttgtgcttcctgggtacaagtacctcggacccttcaacggactcgacaagggagagccggtcaacgaggcagacgccgcggccctcgagtacgacaaggcctacgaccggcagctcgacagcggagacaacccgtacctcaagtacaaccacgccgacgcggagtttcaggagcgccttaaagaagatacgtcttttgggggcaacctcggacgagcagtcttccaggcgaaaaagagggttcttgaacctctgggcctggttgaggaacctgttaagacggctccgggaaaaaagaggccggtagagcactctcctgtggagccagactcctcctcgggaacaggaaaagcgggccagcagcctgcgagaaagagattgaattttggtcagactggagacgcagactccgtacctgacccccagcctctcggacagccaccagcagccccctctggtctgggaactaatacgatggctacaggcagtggcgcaccaatggcagacaataacgagggcgccgacggagtgggtaattcctcgggaagttggcattgcgattccacatggatgggcgacagagtcatcaccaccagcacccgaacctgggctctgcccacctacaacaaccatctgtacaagcagatctccagccaatcaggagccagcaacgacaaccactactttggctacagcaccccttgggggtattttgacttcaacagattccactgccacttttcaccacgtgactggcaaagactcatcaacaacaactggggattccggcccaagagactcaacttcaagctctttaacattcaagtcaaggaggtcacgcagaatgacggtacgacgacgattgccaataaccttaccagcacggttcaggtgtttactgactcggagtaccagctcccgtacgtccccggctcggcgcatcaaggatgcctcccgccgttcccagcagacgtcttcatggtgccacagtatggatacctcaccctgaacaacgggagtcaggcagtaggacgctcttcattttactgcctggagtactttccttctcagatgcttcgtaccggaaacaactttaccttcagctacacctttgaggatgttcctttccacagcagctacgctcacagccagagtttggaccgtctcatgaatcctctcatcgaccagtacctgtattacttgagcagaacaaacactccaagcggaaccaccacgcagtccaggcttcagttttctcaggccggagcaagtgacattcgggaccagtctaggaactggcttcctggaccctgttaccgccagcagcgagtatcaaagacagctgcggacaacaacaacagtgaatactcgtggactggagctaccaagtaccacctcaatggcagagactctctggtgaatccgggcccggccatggccagccacaaggacgatgaagaaaagttttttcctcaaagcggggttctcatctttgggaagcaaggctcagagaaaacaaatgtggacattgaaaaggtcatgattacagacgaagaggaaatcagaaccaccaatcccgtggccacggagcagtatggttctgtatctaccaacctccagagcggcaacacacaagcagctactgcagatgtcaacacacaaggcgttcttccaggcatggtctggcaggacagagacgtgcacctgcaggggcctatctgggcaaagattccacacacggacggacattttcacccctctcccctcatgggcggatttggacttaaacaccctcctccacagattctcatcaagaacaccccggtacctgcaaatccttcgaccaccttcagtgcggcaaagtttgcttccttcatcacacagtattccacagggcaggtcagcgtggagatcgagtgggagctgcagaaggagaacagcaaacgctggaaccccgagatccagtacacttccaactacaacaaatctgttaatgtggactttactgtggacactaatggtgtgtattcagagcctcgccccattggcaccagatacctgactcgtaatctgtaattgcttgttaatcaataaaccgtttaattcgtttcagttgaactttggtctctgcgaagggcgaattcgtttaaaccctgcaggactagtccctttagtgagg

SEQ ID NO: 558 - DNA, 3162 bp, unidentified
  source 1..3162: mol_type = unassigned DNA; note = Adeno-associated virus
gaattgaatttagcggccgcgaattcgcccttcgcagagaccaaagttcaactgaaacgaattaaacggtttattgattaacaagcaattacagattacgagtcaggtatctggtgccaatggggcgaggctctgaatacacgccattagtgtccacagtaaagtccacattaacagacttgttgtagttggaagtgtactgaatttcgggattccagcgtttgctgttttccttctgcagctcccactcgatctccacgctgacctgtcccgtggagtactgtgtgatgaaggaagcaaactttgccgcactgaaggtggtcgaaggattcgcaggtaccggggtgttcttgatgagaatctgtggaggagggtgtttaagtccgaatccacccatgaggggagaggggtgaaaatgtccgtccgtgtgtggaatctttgcccagatgggcccctgaaggtacacatctctgtcctgccagaccatgcctggaagaacgccttgtgtgttgacatctgcggtagctgcttgtctgttgcctctctggaggttggtagatacagaaccgtactgctccgtagccacgggattggttgtcctgatttcctcttcgtctgtaatcatgaccttttcaatgtccacatttgttttctctgagccttgcttcccaaagatgagaaccccgctctgaggaaaaaacttttcttcattgtccttgtggcttgccatggccgggcccggattcaccagagagtctctgccattgaggtggtacttggtagctccagtccacgagtattcactgttgttgttatccgcagatgtctttgatactcgctgctggcggtaacagggtccaggaagccagttcctagactggtcccgaatgtcactcgctccggcctgagaaaactgaagccttgactgcgtggtggttccacttggagtgtttgttgtgctcaagtaatacaggtactggtcgatgagaggattcatgagacggtccagactctggctgtgagcgtagccgctgtggaaaggaacgtcctcaaaagtgtagctgaaggtaaagttgtttccggtacgcagcatctgagaaggaaagtactccaggcagtaaaatgaagagcgtcctactgcctgactcccgttgttcagggtgaggtatccatactgtggcaccatgaagacgtctgctgggaacggcgggaggcatccttgatgcgccgagccgaggacgtacgggagctggtactccgagtcagtaaacacctgaaccgtgctggtaaggttattggcaatcgtcgtcgtaccgtcattctgcgtgacctctttgacttgaatgttaaagagcttgaagttgagtctcttgggtcggaatccccagttgttgttgatgagtctttgccagtcacgtggtgaaaagtggcagtggaatctgttgaagtcaaaatacccccaaggggtgctgtagccaaagtagtgattgtcgttcgaggctcctgattggctggaaatttgtttgtagaggtggttgttgtaggtgggcagggcccaggttcgggtgctggtggtgatgactctgtcgcccatccatgtggaatcgcaatgccaatttcccgaggaattacccactccgtcggcgccctcgttattgtctgccattggtgcgccactgcctgtagccatcgtattagttcccagaccagagggggctgctggtggctgtccgagaggctgggggtcaggtactgagtctgcgtctccagtctgaccaaaattcaatctttttcttgcaggctgctggcccgcctttccggttcccgaggaggagtctggctccacaggagagtgctctaccggcctcttttttcctggagccgtcttgacaggttccccaaccaggcccagaggttcaagaaccctctttttcgcctggaagactgctcgtccgaggttgcccccaaaagacgtatcttctttaaggcgctcctgaaactccgcgtcggcgtggttgtacttgaggtacgggttgtctccgctgtcgagctgccggtcgtaggctttgtcgtgctcgagggccgcggcgtctgcctcgttgaccggctctcccttgtcgagtccgttgaagggtccgaggtacttgtacccaggaagcacaagacccctgctgtcgtccttatgccgctctgcgggctttggtggtggtgggccaggtttgagcttccaccactgtcttattccttcagagagagtgtcctcgagccaatctggaagataaccatcggcagccatacctgatttaaatcatttattgttcaaagatgcagtcatccaaatccacattgaccagatcgcaggcagtgcaagcgtctggcacctttcccatgatatgatgaatgtagcacagtttctgatacgcctttttgacgacagaaacgggttgagattctgacacgggaaagcactctaaacagtctttctgtccgtgagtgaagcagatatttgaattctgattcattctctcgcattgtctgcagggaaacagcatcagattcatgcccacgtgacgagaacatttgttttggtacctgtctgcgtagttgatcgaagcttccgcgtctgacgtcgatggctgcgcaactgactcgcgcacccgtttgggctcacttatatctgcgtcactgggggcgggtcttttcttggctccaccctttttgacgtagaattcatgctccacctcaaccacgtgatcctttgcccaccggaaaaagtctttgacttcctgcttggtgaccttcccaaagtcatgatccagacggcgggtgagttcaaatttgaacatccggtcttgcaacggctgctggtgttcgaaggtcgttgagttcccgtcaatcacggcgcacatgttggtgttggaggtgacgatcacgggagtcgggtctatctgggccgaggacttgcatttctggtccacgcgcaccttgcttcctccgagaatggctttggccgactccacgaccttggcggtcatcttcccctcctcccaccagatcaccatcttgtcgacacagtcgttgaagggaaagttctcattggtccagttgacgcagcaagggcgaattcgtttaaacctgcaggactagtccctttagtgaggg

SEQ ID NO: 559 - DNA, 3164 bp, unidentified
  source 1..3164: mol_type = unassigned DNA; note = Adeno-associated virus
gcgaattgaatttagcggccgcgaattcgcccttcgcagagaccaaagttcaactgaaacgaattaaacggtttattgattaacaagcaattacaaattacgagtcaggtatctggtgccaatggggcgaggctctgaatacacgccattagtgtccacagtaaagtccacattaacagacttgttgtagttggaagtgtactgaatttcgggattccagcgtttgctgttttccttctgcagctcccactcgatctccacgctgacctgtcccgtggagtactgtgtgatgaaggaagcaaactttgccgcactgaaggtggtcgaaggattcgcaggtaccggggtgttcttgatgagaatctgtggaggagggtgtttaggtccgaatccacccatgaggggagaggggtgaaaatgtccgtccgtgtgtggaatctttgcccagatgggcccctgaaggtacacatctctgtcctgccagaccatgcctggaagaacgccttgtgtgttgacatctgcggtagctgcttgtctgttgcctctctggaggttggtagatacagaaccatactgctccgtagccacgggattggttgtcctgatttcctcttcgtctgtaatcatgaccttttcaatgtccacatttgttttctctgagccttgcttcccaaagatgagaaccccgctctgaggaaaaaacttttcttcattgtccttgtggcttgccatggccgggcccggattcaccagagagtctctgccattgaggtggtacttggtagctccagtccacgagtattcactgttgttgttatccgcagatgtctttgatactcgctgctggcggtaacagggtccaggaagccagttcctagactggtcccgaatgtcactcgctccggcctgagaaaactgaagccttgactgcgtggtggttccacttggagtgtttgttgtgctcaagtaatacaggtactggtcgatgagaggattcatgagacggtccagactctggctgtgagcgtagctgctgtggaaaggaacgtcctcaaaagtgtagctgaaggtaaagttgtttccggtacgcagcatctgagaaggaaagtactccgggcagtaaaatgaagagcgtcctactgcctgactcccgttgctcagggtgaggtatccatactgtggcaccatgaagacgtctgctgggaacggcgggaggcatccttgatgcgccgagccgaggacgtacgggagctggtactccgagtcagtaaacacctgaaccgtgctggtaaggttattggcaatcgtcgtcgtaccgtcattctgcgtgacctctttgacttgaatgttaaagagcttgaagttgagtctcttgggtcggaatccccagttgttgttgatgagtctttgccagtcacgtggtgaaaagtggcagtggaatctgttgaagtcaaaatacccccaaggggtgctgtagccaaagtagtgattgtcgttcgaggctcctgattggctggaaatttgtctgtagaggtggttgttgtaggtgggcagggcccaggttcgggtgctggtggtgatgactctgtcgcccatccatgtggaatcgcaatgccgatttcccgaggaattacccactccgtcggcgccctcgttattgtctgccattggtgcgccactgcctgtagccatcgtattagttcccagaccagagggggctgctggtggctgtccgagaggctgggggtcaggtactgagtctgcgtctccagtctgaccaaaattcaatctttttcttgcaggctgctggcccgcctttccggttcccgaggaggagtctggctccacaggagagtgctctaccggcctcttttttcccggagccgtcttaacaggttccccaaccaggcccagaggttcaagaaccctctttttcgcctggaagactgctcgtccgaggttgcccccaaaagacgtatcttctttaaggcgctcctgaaactccgcgtcggcgtggttgtacttgaggtacgggttgtctccgctgtcgagctgccggtcgtaggctttgtcgtgctcgagggccgcggcgtctgcctcgttgaccggctctcccttgtcgagtccgttgaagggtccgaggtacttgtacccaggaagcacaagacccctgctgtcgtccttatgccgctctgcgggctttggtggtggtgggccaggtttgagcttccaccactgtcttattccttcagagagagtgtcctcgagccaatctggaagataaccatcggcagccatacctgatttaaatcatttattgttcaaagatgcagtcatccaaatccacattgaccagatcgcaggcagtgcaagcgtctggcacctttcccatgatatgatgaatgtagcacagtttctgatacgcctttttgacgacagaaacgggttgagattctgacacgggaaagcactctaaacagtctttctgtccgtgagtgaagcagatatttgaattctgattcattctctcgcattgtctgcagggaaacagcatcagattcatgcccacgtgacgagaacatttgttttggtacctgtctgcgtagttgatcgaagcttccgcgtctgacgtcgatggctgcgcaactgactcgcgcacccgtttgggcccacttatatctgcgtcactgggggcgggtcttttcttggctccaccctttttgacgtagaattcatgctccacctcaaccacgtgatcctttgcccaccggaaaaagtctttgacttcctgcttggtgaccttcccaaagtcatgatccagacggcgggtgagttcaaatttgaacatccggtcttgcaacggctgctggtgttcgaaggtcgttgagttcccgtcaatcacggcgcacatgttggtgttggaggtgacgatcacgggagtcgggtctatctgggccgaggacttgcatttctggtccacgcgcaccttgcttcctccgagaatggctttggccgactccacgaccttggcggtcatcttcccctcctcccaccagatcaccatcttgtcgacacagtcgttgaagggaaagttctcattggtccagttgacgcagcaagggcgaattcgtttaaacctgcaggactagtccctttagtgaggg

SEQ ID NO: 560 - DNA, 3163 bp, unidentified
  source 1..3163: mol_type = unassigned DNA; note = Adeno-associated virus
accctcactaaagggactagtcctgcaggtttaaacgaattcgcccttgctgcgtcaactggagcaatgagaactttcccttcaacgactgtgtcgacaagatggtgatttggtgggaggaggggaagatgaccgccaaggtcgtggagtcggccaaagccattctcggaggaagcaaggtgcgcgtggaccagaaatgcaagtcctcggcccagatagatccgactcccgtgatcgtcacctccaacaccaacatgtgcgccgtgattgacgggaactcaacgaccttcgaacaccagcagccgttgcaagaccggatgttcaaatttgaactcacccgccgtctggatcatgactttgggaaggtcaccaagcaggaagtcaaagactttttccggtgggcaaaggatcacgtggttgaggtggagcatggattctacgtcaaaaagggtggagccaagaaaagacccgcccctagtgacgcagatataagtgagcccaaacgggtgcgcgagtcagttgcgcagccatcgacgtcggacgcggaagcttcgatcaactacgcggacaggtaccaaaacaaatgttctcgtcacgtgggcatgaatctgatgctgtttccctgcagacaatgcgagagaatgaatcaaaattcaaatatctgcttcactcacggacagaaagactgtttagagtgctttcccgtgtcagaatctcaacctgtttctgtcgtcaaaaaggcgtatcagaaactgcgctacattcatcatatcatgggaaaggtgccagacgcttgcactgcctgcgatctggtcaatgtggatttggatgactgcatctctgaacaataaatgatttaaatcaggtatggctgccgatggttatcttccagattggctcgaggacactctctctgaaggaataagacagtggtggaagctcaaacctggcccaccaccaccaaagcccgcagagcggcataaggacgacagcaggggtcttgtgcttcctgggtacaagtacctcggacccttcaacggactcgacaagggagagccggtcaacgaggcagacgccgcggccctcgagcacgacaaggcctacgaccggcagctcgacagcggagacaacccgtacctcaagtacaaccacgccgacgcggagtttcaggagcgtcttaaagaagatacgtcttttgggggcaacctcggacgagcagtcttccaggcgaaaaagagggttcttgaacctctgggcctggttgaggaacctgttaagacggctccgggaaaaaagaggccggtagagcactctcctgcggagccagactcctcctcgggaaccggaaaagcgggccagcagcctgcaagaaaaagactgaatttcggtcagactggagacgcagactccgtacctgacccccagcctctcggacagccaccagcagcccccacaagtttgggatctactacaatggctacaggcagtggcgcaccaatggcagacaataacgagggtgccgatggagtgggtaattcctcaggaaattggcattgcgattcccaatggctgggcgacagagtcatcaccaccagcacccgaacctgggccctgcccacctacaacaaccacctttacaagcaaatctccagccaatcaggagcctcaaacgacaaccactactttggctacagcaccccctgggggtattttgacttcaacagattccactgccacttttcaccacgtgactggcaaagactcatcaacaacaactggggattccgacccaagagactcaacttcaagctctttaacattcaagtcaaagaggtcacgcagaatgacggtacgacgacgattgccaataaccttaccagcacggttcaggtgtttactgactcggagtaccagctcccgtacgtcctcggctcggcgcatcaaggatgcctcccgccgtttccagcggacgtcttcatggtcccacagtatggatacctcaccctgaacaacgggagtcaggcggtaggacgctcttccttttactgcctggagtgctttccttctcagatgctgcgtactggaaacaactttcagttcagctacacttttgaagacgtgcctttccacagcagctacgctcacagccagagtttggatcggctgatgaatcctctgatcgaccagtacctgtattatctaaacagaacacaaacagctagtggaactcagcagtctcggctactgtttagccaagctggacccacaagcatgtctcttcaagctaaaaactggctgcctggaccgtgttatcgccagcagcgtttgtcaaagcaggcaaacgacaacaacaacagcaactttccctggactggagctaccaagtaccacctcaatggcagagactctttggtgaacccgggcccggccatggccagccacaaggacgatgaagaaaagtttttccccatgcatggaaccctaatatttggtaaagaaggaacaaatgctaccaacgcggaattggaaaatgtcatgattacagatgaagaggaaatcaggaccaccaatcccgtggctacagagcagtacggatatgtgtcaaataatttgcaaaactcaaatactgctgcaagtactgaaactgtgaatcaccaaggagcattacctggtatggtgtggcaggatcgagacgtgtacctgcagggacccatttgggccaagattcctcacaccgatggacactttcatccttctccactgatgggaggttttggactcaaacacccgcctcctcagattatgatcaaaaacactcccgttccagccaatcctcccacaaacttcagttctgccaagtttgcttccttcatcacacagtattccacgggacaggtcagcgtggagatcgagtgggagctgcagaaggagaacagcaaacgctggaatcccgaaattcagtacacttccaactacaacaaatctgttaatgtggactttactgtggacactaatggtgtgtattcagagcctcgccccattggcaccagatacctgactcgtaatctgtaattgcttgttaatcaataaaccgtttaattcgtttcagttgaactttggtctctgcgaagggcgaattcgcggccgctaaattcaattcgcc

SEQ ID NO: 561 - protein, 735 aa, unidentified
  source 1..735: note = Adeno-associated virus
MAADGYLPDWLEDTLSEGIRQWWKLKPGPPPPKPAERHKDDSRGLVLPGYKYLGPFNGLYKGEPVDEADAAALEHDKAYDRQLDSGDNPYLKYNHADAEFQERLKEDTSFGGNLGRAVFQAKKRVLEPLGLVGEPVKTAPGKKRPVEHSPVEPDSSSGTGKAGNQPARKRLNFGQTGDADSVPDPQPLGQPPAAPSGLGSTTMATGSGAPVADNNEGADGVGNSSGNWHCDSQWLGDRVITTSTRTWALPTYNNHLYKQISSQSGASNDNHYFGYSTPWGYFDFNRFHCHFSPRDRQRLINNNWGFRPKRLNFKLFNIQVKEVTQNDGTTTIANNLTSTVQVFTDSGYQLPYVLGLAHQGCLPPFPADVFMVPQYGYLTLNNGSQAVGRSSFYCLEYFPSQMLRTGNNFQFSYTFEDVPFHSSYAHSQSLDRLMNPLIDQYLYYLNKTQSNSGTLQQSRLLFSQAGPTSMSLQAKNWLPGPCYRQQRLSKQANDNNNSNFPWTAATKYHLNGRDSLVNPGPAMASHKDDEEKFFPMHGTLIFGKQGTNANDADLDNVMITDEEEIRTTNPVATEQYGYVSNNLQNSNTGPTTGTVNHQGALPGMVWQDRDVYLQGPIWAKIPHTDGHFHPSPLMGGFGLKHPPPQIMIKNTPVPANPPTNFSSAKFASFITQYSTGQVSVEIEWELQKEDSKRWNPEIQYTSNYNKPVNVDFTVDTNGVYSEPRPIGTRYLTRNL

SEQ ID NO: 562 - DNA, 2208 bp, unidentified
  source 1..2208: mol_type = unassigned DNA; note = Adeno-associated virus
atggctgccgatggttatcttccagattggctcgaggacactctctctgaaggaataagacagtggtggaagctcaaacctggcccaccaccaccaaagcccgcagagcggcataaggacgacagcaggggtcttgtgcttcctgggtacaagtacctcggacccttcaacggactctacaagggagagccggtcgacgaggcagacgccgcggccctcgagcacgacaaggcctacgaccggcagctcgacagcggagacaacccgtacctcaagtacaaccacgccgacgcggagtttcaggagcgccttaaagaagatacgtcttttgggggcaacctcggacgagcagtcttccaggccaaaaagagggttcttgaacctctgggcttggttggggagcctgttaaaacggctccgggaaaaaagaggccggtagagcactctcctgtggagccagactcctcctcgggaaccggaaaagcgggcaaccagcctgcaagaaaaagattgaattttggtcagactggagacgcagactccgtacctgacccccagcctctcggacagccaccagcagccccctctggtctgggatctactacaatggctacaggcagtggcgcaccagtggcagacaataacgagggtgccgatggagtgggtaattcctcaggaaattggcattgcgattcccaatggctgggcgacagagtcatcaccaccagcacccgaacctgggctctgcccacctacaataaccacctctacaagcaaatctccagccaatcaggagcctcaaacgacaaccactactttggctacagcaccccctgggggtattttgacttcaacagattccactgccacttttcaccacgtgaccggcaaagactcatcaacaacaactggggattccgaccaaaaagactcaacttcaagctctttaacattcaagtcaaagaggtcacgcagaatgacggtacgacgacgattgccaataaccttaccagcacggttcaggtgtttactgactcggggtaccagctcccgtacgtcctcggcttggcgcatcaaggatgcctcccgccgttcccagcagacgtcttcatggtgccacagtatggatacctcaccctgaacaacgggagtcaggcggtaggacgctcttccttttactgcctggagtactttccttctcagatgctgcgtactggaaacaactttcagttcagctacacctttgaagacgttcctttccacagcagctacgctcacagccagagtctggatcggctgatgaatcctctgatcgaccagtacctgtattatctgaacaagacacaatcaaatagtggaactcttcagcagtctcggctactgtttagccaagctggacccaccagcatgtctcttcaagctaaaaactggctgcctggaccttgctacagacagcagcgtctgtcaaagcaggcaaacgacaacaacaacagcaactttccctggactgcggctacaaagtatcatctaaatggccgggactcgttggttaatccaggaccagctatggccagccacaaagacgatgaagaaaagtttttccccatgcatggaaccctgatatttggtaaacaaggaacaaatgctaacgacgcggatttggacaatgtcatgattacagatgaagaagaaatccgcaccaccaatcccgtggctacggagcagtacggatatgtgtcaaataatttgcaaaactcaaatactggtccaactactggaactgtcaatcaccaaggagcgttacctggtatggtgtggcaggatcgagacgtgtacctgcagggacccatttgggccaagattcctcacaccgatggacactttcatccttctccacttatgggaggttttggactcaaacacccacctcctcagatcatgattaaaaacactcccgttccagccaatcctcccacaaacttcagttctgccaagtttgcttctttcatcacacagtattccacgggacaagtcagcgtggagatcgagtgggagctgcagaaggaggacagcaaacgctggaaccccgagatccagtacacttccaactataacaaacctgttaatgtggactttactgtggacactaatggtgtgtattcagagcctcgccccattggcaccagatacctgactcgtaatctgtaa

SEQ ID NO: 563 - DNA, 3161 bp, unidentified
  source 1..3161: mol_type = unassigned DNA; note = Adeno-associated virus
cgaattgatttagcggccgcgaattcgcccttcgcagagaccaaagttcaactgaaacgaattaaacggtttattgattaacaagcaattacagattacgagtcaggtatctggtgccaatggggcgaggctctgaatacacaccattagtgtccacagtaaagtccacattaacagatttgttgtagttggaagtgtactggatctcgggattccagcgtttgctgttctccttctgtagctcccactcgatctccacgctgacccgccccgtggaatactgtgtgatgaaggaagcaaactttgccgcactgaaggtggtcgaaggattcgcaggtaccggggtgtttttgatgagaatctgtggaggagggtgtttaagtccgaatccgcccatgaggggagaggggtgaaaatgtccgtccgtgtgcggaatctttgcccagataggcccctgcaggtacacgtctctgtcctgccagaccatgcctggaagaacgccttgtgtgttgacatctgcagtagatgcttgtgtgttgccgctctggaggttggtagatacagaaccatactgctccgtggccacgggattggtggttctgatttcctcttcgtctgtaatcatgaccttttcaatgtccacatttgttttctctgatccttgttttccaaagatgagaaccccgctctgaggaaaaaacttttcttcatcgtccttgtggctggccattgccgggcccggattcaccagagagtctctgccattgaggtggtacttggtagctccaatccacgagtattcactgttgttgttgtccgcagatgtctttgatactcgctgctggcggtaacagggtccaggaagccagttcctagactgatcccgaatgtcactcgctccggcctgagaaaactgaagcctggactgcgtggtggttccgcttggagtgtttgttctgctcaagtaatacaggtactggtcgatgagaggattcatgagacggtccaaactctggctgtgagcgtagctgctgtggaaaggaacatcctcaaaggtgtagctgaaggtaaagttgtttccggtacgcagcatctgagaagggaagtactccaggcagtaaaatgaagagcgtcctactgcctgactcccgttgttcagggtgaggtatccatactgtggcaccatgaagacgtctgctgggaacggcgggaggcatccttgatgcgccgagccgaggacgtacgggagctggtactccgagtcagtaaacacctgaaccgtgctggtaaggttattggcaatcgtcgtcgtaccatcattctgcgtgacctctctgacttgaatgttaaagagcttgaagttgagtctcttgggccggaatccccagttgttgttgatgagtctttgccagtcacgtggtgaaaagtggcagtggaatctgttgaagtcaaaatacccccaaggggtgctgtagccaaagtagtggttgtcgttgctggctcctgattggctggaaatctgcttgtacagatggttgttgtaggtgggcagagcccaggttcgggtgctggtggtgatgactctgtcgcccatccatgtggaatcgcaatgccaatttcccgaggaattacccactccgtcggcgccatcgttattgtctgccattggtgcgccactgcctgtagccatcgtattagttcccagaccagagggggctgctggtggctgtccgagaggctgggggtcaggtacggagtctgcgtctccagtctgaccgaaattcaatctctttcttgcaggctggttgcccgcttttccggttcccgaggaggagtctggctccacaggagagtgctctaccggcctcttttttcccggagccgtcttaacaggctcctcaaccaggcccagaggttcaagaaccctcttttttgcctggaagactgctcgtccgaggttgcccccaaaagacgtatcttctttaaggcgctcctgaaactccgcgtcggcgtggtcgtacttgaggtacgggttgtctccgctgtcgagctgccggtcgtaggccttgtcgtgctcgagggccgcggcgtctgcctcgttgaccggctctcccttgtcgagtccgttgaagggtccgaggtacttgtacccaggaagcacaagacccctgctgtcgtccttatgccgctctgcgggctttggtggtggtgggccaggtttgagcttccaccactgtcttattccttcagagagagtgtcctcgagccaatctggaagataaccatcggcagccatacctgatttaaatcatttattgttcagagatgcagtcatccaaatccacattgaccagatcgcaggcagtgcaagcgtctggcacctttcccatgatatgatgaatgtagcaaagtttctgatacgcctttttgacgacagaaacgggttgagattctgacacgggaaagcactctaaacagtctttctgtccgtgagtgaagcagatatttgaattctgattcattctctcgcattgtctgcagggaaacagcatcagattcatgcccacgtgacgagaacatttgttttggtacctgtccgcgtagttgatcgaagcttccgcgtctgacgtcgatggctgcgcaactgactcgcgcgcccgtttgggctcacttatatctgcgtcactgggggcgggtcttttcttggctccaccctttttgacgtagaattcatgctccacctcaaccacgtgatcctttgcccaccggaaaaagtctttcacttcctgcttggtgaccttcccaaagtcatgatccagacggcgggttagttcaaatttgaacatccggtcttgcaacggctgctggtgttcgaaggtcgttgagttcccgtcaatcacggcgcacatgttggtgttggaggtggcgatcacgggagtcgggtctatctgggccgaggacttgcacttttggtccacgcgcaccttgcttcctccgagaatggcttcggccgattccacgaccttggcggtcatctttccctcctcccaccagatcaccatcttgtcgacacagtcgttgaagggaaagttctcattggtccagttgacgcagcaagggcgaattcgtttaaacctgcaggaactagtcccttagtgagg

SEQ ID NO: 564 - protein, 735 aa, unidentified
  source 1..735: note = Adeno-associated virus
MAADGYLPDWLEDTLSEGIRQWWKLKPGPPPPKPAERHKDDSRGLVLPGYKYLGPFNGLYKGEPVNEADAAALEHDKAYDRQLDSGDNPYLKYNHAGAEFQERLKEDTSFGGNLGRAVFQAKKRVLEPLGLVEEPVKTAPGKKRPVEHSPVEPDSSSGTGKAGNQPARKRLNFGQTGDADSVPDPQPLGQPPAAPSGLGSTTMATGSGAPVADNNEGADGVGNSSGNWHCDSQWLGDRVITTSTRTWALPTYNNHLYKQISSQSGASNDNHYFGYSTPWGYFDFNRFHCHFSPRDWQRLINNNWGFRPKRLNFKLFNIQVKEVTQNDGTTTIANNLTSTVQVFTDSEYQLPYVLGSAHQGCLPPFPADVFMVPQYGYLTLNNGSQAVGRSSFYCLEYFPSQMLRTGNNFQFSYTFEDVPFHSSYAHSQSLDRLMNPLIDQYLYYLNKTQSNSGTLQQSRLLFSQAGPTSMSLQAKNWLPGPCYRQQRLSKQANDNNNSNFPWTAATKYHLNGRDSLVNPGPAMASHKDDEEKFFPMHGTLIFGKQGTNANDADLDNVMITDEEEIRTTNPVATEQYGYVSNNLQDSNTGPTTGTVNHQGALPGMVWQDRDVYLQGPIWAKIPHTDGHFHPSPLMGGFGLKHPPPQIMIKNTPVPANPPTNFSSAKFASFITQYSTGQVSVEIEWELQKENSKRWNPEIQYTSNYNKSVNVDFTVDTNGVYSEPRPIGTRYLTRNL

SEQ ID NO: 565 - DNA, 2208 bp, unidentified
  source 1..2208: mol_type = unassigned DNA; note = Adeno-associated virus
atggctgccgatggttatcttccagattggctcgaggacactctctctgaaggaataagacagtggtggaagctcaaacctggcccaccaccgccaaagcccgcagagcggcataaggacgacagcaggggtcttgtgcttcctgggtacaagtacctcggacccttcaacggactctacaagggagagccggtcaacgaggcagacgccgcggccctcgagcacgacaaggcctacgaccggcagctcgacagcggagacaacccgtacctcaagtacaaccacgccggcgcggagtttcaggagcgccttaaagaagatacgtcttttgggggcaacctcggacgagcagtcttccaggccaaaaagagggttcttgaacctctgggcttggttgaggagcctgttaaaacggctccgggaaaaaagaggccggtagagcactctcctgtggagccagactcctcctcgggaaccggaaaagcgggcaaccagcctgcaagaaaaagattgaattttggtcagactggagacgcagactccgtacctgacccccagcctctcggacagccaccagcagccccctctggtctgggatctactacaatggctacaggcagtggcgcaccagtggcagacaataacgagggtgccgatggagtgggtaattcctcaggaaattggcattgcgattcccaatggctgggcgacagagtcatcaccaccagcacccgaacctgggctctgcccacctacaacaaccacctctacaagcaaatctccagccaatcaggagcctcaaacgacaaccactactttggctacagcaccccctgggggtattttgacttcaacagattccactgccacttttcaccacgtgactggcaaagactcatcaacaacaactggggattccgaccaaagagactcaacttcaagctctttaacattcaagtcaaagaggtcacgcagaatgacggtacgacgacgattgccaataaccttaccagcacggttcaggtgtttactgactcggagtaccagctcccgtacgtcctcggctcggcgcatcaaggatgcctcccgccgttcccagcagacgtcttcatggtgccacagtatggatacctcaccctgaacaacgggagtcaggcggtaggacgctcttccttttactgcctggagtactttccttctcagatgctgcgtactggaaacaactttcagttcagctacacctttgaagacgttcctttccacagcagctacgctcacagccagagtctggatcggctgatgaatcctctgatcgaccagtacctgtattatctgaacaagacacaatcaaatagtggaacccttcagcagtctcggctactgtttagccaagctggacccaccagcatgtctcttcaagctaaaaactggctgcctggaccttgctacagacagcagcgtctgtcaaagcaggcaaacgacaacaacaacagcaactttccctggactgcggctacaaagtatcatctaaatggccgggactcgttggttaatccaggaccagctatggccagccacaaagacgatgaagaaaagtttttccccatgcatggaaccctgatatttggtaaacaaggaacaaatgctaacgacgcggatttggacaatgtcatgattacagatgaagaagaaatccgcaccaccaatcccgtggctacggagcagtacggatatgtgtcaaataatttgcaagactcaaatactggtccaactactggaactgtcaatcaccaaggagcgttacctggtatggtgtggcaggatcgagacgtgtacctgcagggacccatttgggccaagattcctcacaccgatggacactttcatccttctccacttatgggaggttttggactcaaacacccacctcctcagatcatgattaaaaacactcccgttccagccaatcctcccacaaacttcagttctgccaagtttgcttctttcatcacacagtattccacgggacaagtcagcgtagagatcgagtgggagctgcagaaggagaacagcaaacgctggaaccccgagatccagtacacttccaactataacaaatctgttaatgtggactttactgtggacactaatggtgtgtattcagagcctcgccccattggcaccagatacctgactcgtaatctgtaa

SEQ ID NO: 566 - protein, 738 aa, unidentified
  source 1..738: note = Adeno-associated virus
MAADGYLPDWLEDNLSEGIREWWDLKPGAPKPKANQQKQDDGRGLVLPGCKYLGPFNGLDKGEPVNAADAAALEHDKAYDQQLKAGDNPYLRYNHADAEFQERLQEDTSFGGNLGRAVFQAKKRVLEPLGLVEEGAKTAPGKKRPVEPSPQRSPDSSTGIGKTGQQPAKKRLNFGQTGDSESVPDPQPIGEPPAGPSGLGSGTMAAGGGAPMADNNEGADGVGSSSGNWHCDSTWLGDRVITTSTRTWALPTYNNHLYKQISNGTSGGSTNDNTYFGYSTPWGYFDFNRFHCHFSPRDWQRLINNNWGFRPKRLNFKLFNIQVKEVTQNEGTKTIANNLTSTIQVFTDSEYQLPYVLGSAHQGCPPPFPADVFMIPQYGYLTLNNGSQAVGRSSFYCLEYFPSQMRRTGNNFEFSYQFEDVPFHSSYAHSQSLDRLMNPLIDQYLYYLSRTQSTGGTAGTQQLLFSQAGPNNMSAQAKNWLPGPCYRQQRVSTTLSQNNNSNFAWTGATKYHLNGRDSLVNPGVAMATHKDDEERFFPSSGVLMFGKQGAGKDNVDYSSVMLTSEEEIKTTNPVATEQYGVVADNLQQQNAAPIVGAVNSQGALPGMVWQNRDVYLQGPIWAKIPHTDGNFHPSPLMGGFGLKHPPPQILIKNTPVPADPPTTFSQAKLASFITQYSTGQVSVEIEWELQKENSKRWNPEIQYTSNYNKSVNVDFTVDTNGVYSEPRPIGTRYLTRNL

SEQ ID NO: 567 - DNA, 2217 bp, unidentified
  source 1..2217: mol_type = unassigned DNA; note = Adeno-associated virus
atggctgccgatggttatcttccagattggctcgaggacaacctctctgagggcattcgcgagtggtgggacttgaaacctggagccccgaaacccaaagccaaccagcaaaagcaggacgacggccggggtctggtgcttcctggctgcaagtacctcggacccttcaacggactcgacaagggggagcccgtcaacgcggcggacgcagcggccctcgagcacgacaaggcctacgaccagcagctcaaagcgggtgacaatccgtacctgcggtataaccacgccgacgccgagtttcaggagcgtctgcaagaagatacgtcttttgggggcaacctcgggcgagcagtcttccaggccaagaagcgggttctcgaacctctcggtctggttgaggaaggcgctaagacggctcctggaaagaagagaccggtagagccatcaccccagcgttctccagactcctctacgggcatcggcaagacaggccagcagcccgcgaaaaagagactcaactttgggcagactggcgactcagagtcagtgcccgaccctcaaccaatcggagaaccccccgcaggcccctctggtctgggatctggtacaatggctgcaggcggtggcgctccaatggcagacaataacgaaggcgccgacggagtgggtagttcctcaggaaattggcattgcgattccacatggctgggcgacagagtcatcaccaccagcacccgaacctgggccctccccacctacaacaaccacctctacaagcaaatctccaacgggacatcgggaggaagcaccaacgacaacacctacttcggctacagcaccccctgggggtattttgactttaacagattccactgccacttctcaccacgtgactggcagcgactcatcaacaacaactggggattccggcccaagagactcaacttcaagctcttcaacatccaggtcaaggaggtcacgcagaatgaaggcaccaagaccatcgccaataaccttaccagcacgattcaggtctttacggactcggaataccagctcccgtacgtcctcggctctgcgcaccagggctgcccgcctccgttcccggcggacgtcttcatgattcctcagtacgggtacctgactctgaacaacggcagtcaggccgtgggccgttcctccttctactgcctggagtactttccttctcaaatgcggagaacgggcaacaactttgagttcagctaccagtttgaggacgtgccttttcacagcagctacgcgcatagccaaagcctggaccggctgatgaaccccctcatcgaccagtacctgtactacctgtctcggactcagtccacgggaggtaccgcaggaactcagcagttgctattttctcaggccgggcctaataacatgtcggctcaggccaaaaactggctacccgggccctgctaccggcagcaacgcgtctccacgacactgtcgcaaaataacaacagcaactttgcttggaccggtgccaccaagtatcatctgaatggcagagactctctggtaaatcccggtgtcgctatggcaacgcacaaggacgacgaagagcgattttttccatccagcggagtcttgatgtttgggaaacagggagctggaaaagacaacgtggactatagcagcgttatgctaaccagtgaggaagaaatcaaaaccaccaacccagtggccacagaacagtacggcgtggtggccgataacctgcaacagcaaaacgccgctcctattgtaggggccgtcaacagtcaaggagccttacctggcatggtctggcagaaccgggacgtgtacctgcagggtcctatctgggccaagattcctcacacggacggcaactttcatccttcgccgctgatgggaggctttggactgaaacacccgcctcctcagatcctgattaagaatacacctgttcccgcggatcctccaactaccttcagtcaagccaagctggcgtcgttcatcacgcagtacagcaccggacaggtcagcgtggaaattgaatgggagctgcagaaagagaacagcaagcgctggaacccagagattcagtatacttccaactataacaaatctgttaatgtggactttactgtggacactaatggtgtgtattcagagcctcgccccattggcaccagatacctgactcgtaatctgtaa

SEQ ID NO: 568 - DNA, 3167 bp, unidentified
  source 1..3167: mol_type = unassigned DNA; note = Adeno-associated virus
attgaatttagcggccgcgaattcgcccttcgcagagaccaaagttcaactgaaacgaattaaacggtttattgattaacaagcaattacagattacgagtcaggtacctggtgccaatggggcgaggctctgaatacacaccattagtgtccacagtaaagtccacattaacagatttgttgtagttggaagtgtactgaatctcgggattccagcgtttgctgttctccttctgcagctcccactcgatctccacgctgacctgccccgtggagtactgtgtaatgaaggaagcaaactttgccgcactgaaggtagtcgaaggattcgcaggtaccggggtgttcttgatgagaatctgcgggggagggtgtttaagtccgaatccgcccatgaggggagaggggtgaaaatgtccgtccgtgtgtggaatctttgcccagatgggcccctgcaggtacacgtctctgtcctgccacaccatgcctggaagaacgccttgtgtgttgacatctgaggtagctgcttgtgtgttgccgctctggaggttggtagatacagaaccatactgctccgtagccacgggattggtggtcctgatttcctcttcgtctgtaatcatgaccttttcaatgtccacattagtttttcccgagtcttgttttccaaagatgagaaccccgctctgaggaaaaaacttttcttcatcgtccttgtggctggccatggccgggcccggattcaccagagagtctcttccattaaggtggtacttggtagctccagtccacgagtattcactgttgttgttatccgcagatgtctttgatactcgctgctggcggtaacagggtccaggaagccagttcctagactggtcccgaatgtcacttgctccggcctgagaaaactgaagccttgactgcgtggtggttccgcttggagtgtttgttctgctcaagtaatacaggtactggtcgatgagaggattcatgagacggtccaaactctggctgtgggcgtagctgctgtggaaaggaacgtcctcaaaggtgtagctgaaggtaaagttgtttccggtacgcagcatctgagaaggaaagtactccaggcagtaaaatgaagagcgtcctactgcctgactcccgttgttcagggtgaggtatccatactgtggcaccatgaagacgtctgctgggaacggcgggaggcatccttgatgcgccgagccgaggacgtacgggagctggtactccgagtcagtaaacacctgaaccgtgctggtaaggttattggcaatcgtcgtcgtaccgtcattctgcgtgacctccttgacttgaatgttaaagagcttgaagttgagtcttttgggccggaatccccaattgttgttgatgagtctttgccagtcacgtggcgaaaagtggcagtggaatctgttgaagtcaaaatacccccaaggggtgctgtagccaaagtagtggttgtcgtttgaggctcctgattggctggaaatctgcttgtagaggtggttgttgtaggtgggcagagcccaggtgcgggtgctggtggtgatgactctgtcgcccatccatgtggaatcgcaatgccaatttcccgaggaattacccactccgtcggcgccctcgttattgtctgccattggtgcgccactgcctgtagccatcgtattagttcccagaccagagggggctgctggtggctgtccgagaggctgggggtcaggtacggagtctgcgtctccagtctgaccgaaattcaatctctttcttgcaggctgctggcccgcttttccggttcccgaggaggagtctggctccgcaggagagtgctctaccggcctcttttttcccggagccgtcttaacaggttcctcaaccaggcccagaggttcaagaaccctctttttcgcctggaagactgctcgtccgaggttgcccccaaaagacgtatcttctttaagacgctcctggaactccgcgtcggcgtggttgtacttggggtacgggttgtctccgctgtcgagctgccggtcgtaggccttgtcgtgctcgagggccgcggcgtctgcctcgttgaccggctctcccttgtcgagtccgttgaagggtccaaggtacttgtacccaggaagcacaagacccctgctgtcgtccttatgccgctctgcgggctttggtggtggtgggccaggtttgagcttccaccactgtcttattccttcagagagagtgtcctcgagccaatctggaagataaccatcggcagccatacctgatttaaatcatttattgttcagagatgcagtcatccaaatccacattgaccagatcgcaagcagtgcaagcgtctggcacctttcccatgatatgatgaatgtagcacagtttctgatacgcctttttgacgacagaaacgggttgagattctgacacgggaaagcactctaaacagtctttctgtccgtgagtgaagcagatatttgaattctgattcattctctcgcattgtctgcagggaaacagcatcagattcatgcccacgtgacgagaacatttgttttggtacctgtccgcgtagttgattgaagcttccgcgtctgacgtcgatggctgcgcaactgactcgcgcgcccgtttgggctcacttatatctgcgtcactgggggcgggtctttttttggctccaccctttttgacgtagaattcatgctctacctcaaccacgtgatcctttgcccaccggaaaaagtctttgacttcctgcttggtgaccttcccaaagtcatgatccagacggcgggtgagttcaaatttgaacatccggtcttgcaacggctgctggtgttcgaaggtcgttgagttcccgtcaatcactgcgcacatgttggtgttggaggtgacaatcacgggagtcgggtctatctgggccgaggacttgcatttctggtccacgcgcaccttgcttcctccgagaatggctttggccgactccacgaccttggcggtcatcttcccctcctcccaccagatcaccatcttgtcgacgcaatcattgaaaggaaagttctcattggtccagttgacgcagccgtagaaagggcgaattcgtttaaacctgcaggactagtccctttagtgagggt

SEQ ID NO: 569 - DNA, 3161 bp, unidentified
  source 1..3161: mol_type = unassigned DNA; note = Adeno-associated virus
aattgaatttagcggccgcgaattcgcccttcgcagagaccaaagttcaactgaaacgaattaaacggtttattgattaacaagcaattacagattacgagtcaggtatctggtgccaatggggcgaggctctgaatacacaccattagtgtccacagtaaagtccacattaacagatttgttgtagttggaagtgtactgaatctcgggattccagcgtttgctgttctccttctgcagctcccactcgatctccacgctgacctgccccgtggagtactgtgtaatgaaggaagcaaactttgccgcactgaaggtagtcgaaggattcgcaggtaccggggtgttcttgatgagaatctgcgggggagggtgtttaagtccgaatccgcccatgaggggagaggggtgaaaatgtccgtccgtgtgtggaatctttgcccagatgggcccctgcaggtacacgtctctgtcctgccacaccatgcctggaagaacgccttgtgtgttgacatctgaggtagctgcttgtgtgttgccgctctggaggttggtagatacagaaccatactgctccgtagccacgggattggtggtcctgatttcctcttcgtctgtaatcatgaccttttcaatgtccacattagtttttcccgagtcttgttttccaaagatgagaaccccgctctgaggaaaaaacttttcttcatcgtccttgtggctggccatggccgggcccggattcaccagagagtctcttccattaaggtggtacttggtagctccagtccacgagtattcactgttgttgttatccgcagatgtctttgatactcgctgctggcggtaacagggtccaggaagccagttcctagactggtcccgaatgtcacttgctccggcctgagaaaactgaagccttgactgcgtggtggttccgcttggagtgtttgttctgctcaagtaatacaggtactggtcgacgagaggattcatgagacggtccaaactctggctgtgggcgtagctgctgtggaaaggaacgtcctcaaaggtgtagctgaaggtaaagttgtttccggtacgcagcatctgagaaggaaagtactccaggcagtaaaatgaagagcgtcctactgcctgactcccgttgttcagggtgaggtatccatactgtggcaccatgaagacgtctgctgggaacggcgggaggcatccttgatgcgccgagccgaggacgtacgggagctggtactccgagtcagtaaacacctgaaccgtgctggtaaggttattggcaatcgtcgtcgtaccgtcattctgcgtgacctccttgacttgaatgttaaagagcttgaagttgagtcttttgggccgggatccccaattgttgttgatgagtctttgccagtcacgtggcgaaaagtggcagtggaatctgttgaagtcaaaatacccccaaggggtgctgtagccaaagtagtggttgtcgtttgaggctcctgattggctggaaatctgcctgtagaggtggttgttgtaggtgggcagagcccaggtgcgggtgctggtggtgatgactctgtcgcccatccatgtggaatcgcaatgccaatttcccgaggaattacccactccgtcggcgccctcgttattgtctgccattggtgcgccactgcctgtagccatcgtattagttcccagaccagagggggctgctggtggctgtccgagaggctgggggtcaggtacggagtctgcgtctccagtctgaccgaaattcaatctccttcttgcaggctgctggcccgcttttccggttcccgaggaggagtctggctccgcaagagagtgctctaccggcctcttttttcccggagccgtcttaacaggttcctcaaccaggcccagaggttcaagaaccctctttttcgcctggaagactgctcgtccgaggttgcccccaaaagacgtatcttctttaagacgctcctggaactccgcgtcggcgtggttgtacttgaggtacgggttgtctccgccgtcgagctgccggtcgtaggccttgtcgtgctcgagggccgcggcgtctgcctcgttgaccggctctcccttgtcgagtccgttgaagggtccaaggtacttgtacccaggaagcacaagacccctgctgtcgtccttatgccgctctgcgggctttggtggtggtgggccaggtttgagcttccaccactgtcttattccttcagagagagtgtcctcgagccaatctggaagataaccatcggcagccatacctgatttaaatcatttattgttcagagatgcagtcatccaaatccacattgaccagatcgcaagcagtgcaagcgtctggcacctttcccatgatatgatgaatgtagcacagtttctgatacgcctttttgacgacagaaacgggttgagattctgacacgggaaagcactctaaacagtctttctgtccgtgagtgaagcagatatttgaattctgattcattctctcgcattgtctgcagggaaacagcatcagattcatgcccacgtgacgagaacatttgttttggtacctgtccgcgtagttgattgaagcttccgcgtctgacgtcgatggctgcgcaactgactcgcgcgcccgtttgggctcacttatatctgcgtcactgggggcgggtctttttttggctccaccctttttgacgtagaattcatgctctacctcaaccacgtgatcctttgcccaccggaaaaagtctttgacttcctgcttggtgaccttcccaaagtcatgatccagacggcgggtgagttcaaatttgaacatccggtcttgcaacggctgctggtgttcgaaggtcgttgagttcccgtcaatcactgcgcacatgttggtgttggaggtgacaatcacgggagtcgggtctatctgggccgaggacttgcatttctggtccacgcgcaccttgcttcctccgagaatggctttggccgactccacgaccttggcggtcatcttcccctcctcccaccagatcaccatcttgtcgacgcaatcattgaaaggaaagttctcattggtccagttgacgcagcaagggcgaattcgtttaaacctgcaggactagtccctttagtgaggg

SEQ ID NO: 570 - DNA, 3172 bp, unidentified
  source 1..3172: mol_type = unassigned DNA; note = Adeno-associated virus
gattgaatttagcggccgcgaattcgcccttgctgcgtcaactggaccaatgagaactttcccttcaacgattgcgtcgacaagatggtgatctggtgggaggagggcaagatgaccgccaaggtcgtggagtccgccaaggccattctgggtggaagcaaggtgcgcgtggaccaaaagtgcaagtcatcggcccagatcgaccccacgcccgtgatcgtcacctccaacaccaacatgtgcgccgtgatcgacgggaacagcaccaccttcgagcaccagcagcccctgcaggaccgcatgttcaagttcgagctcacccgccgtctggagcacgactttggcaaggtgaccaagcaggaagtcaaagagttcttccgctgggctcaggatcacgtgactgaggtggcgcatgagttctacgtcagaaagggcggagccaccaaaagacccgcccccagtgacgcggatataagcgagcccaagcgggcctgcccctcagttgcggagccatcgacgtcagacgcggaagcaccggtggactttgcggacaggtaccaaaacaaatgttctcgtcacgcgggcatgcttcagatgctgtttccctgcaagacatgcgagagaatgaatcagaatttcaacgtctgcttcacgcacggggtcagagactgctcagagtgcttccccggcgcgtcggaatctcaacccgtcgtcagaaaaaagacgtatcagaaactgtgcgcgattcatcatctgctggggcgggcacccgagattgcgtgttcggcctgcgatctcgtcaacgtggacttggatgactgtgtttctgagcaataaatgacttaaaccaggtatggctgctgacggttatcttccagattggctcgaggacaacctctctgagggcattcgcgagtggtgggacctgaaacctggagcccccaagcccaaggccaaccagcagaagcaggacgacggccggggtctggtgcttcctggctacaagtacctcggacccttcaacggactcgacaagggggagcccgtcaacgcggcggacgcagcggccctcgagcacgacaaggcctacgaccagcagctcaaagcgggtgacaatccgtacctgcggtataaccacgccgacgccgagtttcaggagcgtctgcaagaagatacgtcttttgggggcaacctcgggcgagcagtcttccaggccaagaagcgggttctcgaacctctcggtctggttgaggaagctgctaagacggctcctggaaagaagagaccggtagaaccgtcacctcagcgttcccccgactcctccgcgggcatcggcaagaaaggccagcagcccgctaaaaagagactgaactttggtcagactggcgactcagagtcagtccccgaccctcaaccaatcggagaaccaccagcaggcccctctggtctgggatctggtacaatggctgcaggcggtggcgctccaatggcagacaataacgaaggcgccgacggagtgggtagttcctcaggaaattggcattgcgattccacatggctgggcgacagagtcatcaccaccagcacccgaacctgggccctgcccacctacaacaaccacctctacaagcaaatatccaatgggacatcgggaggaagcaccaacgacaacacctacttcggctacagcaccccctgggggtattttgacttcaacagattccactgccacttctcaccacgtgactggcagcgactcatcaacaacaactggggattccggccaaaaagactcagcttcaagctcttcaacatccaggtcaaggaggtcacgcagaatgaaggcaccgagaccatcgccaataaccttaccagcacgattcaggtatttacggactcggaataccagctgccgtacgtcctcggctccgcgcaccagggctgcctgcctccgttcccggcggacgtcttcatgattccccagtacggctaccttacactgaacaatggaagtcaagccgtaggccgttcctccttctactgcctggaatattttccatctcaaatgctgcgaactggaaacaattttgaattcagctacaccttcgaggacgtgcctttccacagcagctgcgcacacagccagagctcggaccgactgatgaatcctctcatcgaccagtacctgtactacttatccagaactcggtccacaggaggaactcaaggtacccagcaattgttattttctcaagctgggcctgcaaacatgtcggctcaggctaagaactggctacctggaccttgctaccggcagcagcgagtctctacgacactgtcgcaaaacaacaacagcaactttgcttggactggtgccaccaaatatcacctgaacggaagagactctttggtaaatcccggtgtcgccatggcaacccacaaggacgacgaggaacgcttcttcccgtcgagtggagtcctgatgtttggaaaacagggtgctggaagagacaatgtggactacagcagcgttatgctaaccagcgaagaagaaattaaaaccactaaccctgtagccacagaacaatacggtgtggtggctgacaacttgcagcaaaccaatacagggcctattgtgggaaatgtcaacagccaaggagccttacctggcatggtctggcagaaccgagacgtgtacctgcagggtcccatctgggccaagattcctcacacggacggcaacttccacccttcaccgctaatgggaggatttggactgaagcacccacctcctcagatcctgatcaagaacacgccggtacctgcggatcctccaacaacgttcagccaggcgaaattggcttccttcattacgcagtacagcaccggacaggtcagcgtggaaatcgagtgggagctgcagaaggagaacagcaaacgctggaacccagagattcagtacacttcaaactactacaaatctacaaatgtggactttgctgtcaatacagagggaacttattctgagcctcgccccattggtactcgttacctcacccgtaatctgtaattgctggttaatcaataaaccgtttgattcgtttcagttgaactttggtctctgcgaagggcgaattcgtttaaacctgcaggactagtccctttagtgagg

SEQ ID NO: 571 - DNA, 3172 bp, unidentified
  source 1..3172: mol_type = unassigned DNA; note = Adeno-associated virus
gattgaatttagcggccgcgaattcgcccttgctgcgtcaactggaccaatgagaactttcccttcaacgattgcgtcgacaagatggtgatctggtgggaggagggcaagatgaccgccaaggtcgtggagtccgccaaggccattctgggtggaagcaaggtgcgcgtggaccaaaagtgcaagtcatcggcccagatcgaccccacgcccgtgatcgtcacctccaacaccaacatgtgcgccgtgatcggcgggaacagcaccaccttcgagcaccagcagcccctgcaggaccgcatgttcaagttcgagctcacccgccgtctggagcacgactttggcaaggtgaccaagcaggaagtcaaagagttcttccgctgggctcaggatcacgtgactgaggtggcgcatgagttctacgtcagaaagggcggagccaccaaaagacccgcccccagtgacgcggatataagcgagcccaagcgggcctgcccctcagttgcggagccatcgacgtcagacgcggaagcaccggtggactttgcggacaggtaccaaaacaaatgttctcgtcacgcgggcatgcttcagatgctgtttccctgcaagacatgcgagagaatgaatcagaatttcaacgtctgcttcacgcacggggtcagagactgctcagagtgcctccccggcgcgtcagaatctcaacccgtcgtcagaaaaaagacgtatcagaaactgtgcgcgattcatcatctgctggggcgggcacccgagattgcgtgttcggcctgcgatctcgtcaacgtggacttggatgactgtgtttctgagcaataaatgacttaaaccaggtatggctgctgacggttatcttccagattggctcgaggacaacctctctgagggcattcgcgagtggtgggacctgaaacctggagcccccaagcccaaggccaaccagcagaagcaggacgacggccggggtctggtgcttcttggctacaagtacctcggacccttcaacggactcgacaagggggagcccgtcaatgcggcggacgcagcggccctcgagcacgacaaggcctacgaccagcagctcaaagcgggtgacaatccgtacctgcggtataaccacgccgacgccgagtttcaggagcgtctgcaagaagatacgtcttttgggggcaacctcgggcgagcagtcttccaggccaagaagcgggttctcgaacctctcggtctggttgaggaagctgctaagacggctcctggaaagaagagaccggtagaaccgtcacctcagcgttcccccgactcctccacgggcatcggcaagaaaggccagcagcccgctaaaaagagactgaactttggtcagactggcgactcagagtcagtccccgaccctcaaccaatcggagaaccaccagcaggcccctctggtctgggatctggtacaatggctgcaggcggtggcgctccaatggcagacaataacgaaggcgccgacggagtgggtagttcctcaggaaattggcattgcgattccacatggctgggcgacagagtcatcaccaccagcacccgaacctgggccctgcccacctacaacaaccacctctacaagcaaatatccaatgggacatcgggaggaagcaccaacgacaacacctacttcggctacagcaccccctgggggtattttgacttcaacagattccactgccacttctcaccacgtgactggcagcgactcatcaacaacaactggggattccggccaaaaagactcagcttcaagctcttcaacatccaggtcaaggaggtcacgcagaatgaaggcaccaagaccatcgccaataaccttaccagcacgattcaggtatttacggactcggaataccagctgccgtacgtcctcggctccgcgcaccagggctgcctgcctccgttcccggcggacgtcttcatgattccccagtacggctaccttacactgaacaatggaagtcaagccgtaggccgttcctccttctactgcctggaatattttccatctcaaatgctgcgaactggaaacaattttgaattcagctacaccttcgaggacgtgcctttccacagcggctacgcacacagccagagcttggaccgactgatgaatcctctcatcgaccagtacctgtactacttatccagaactcagtccacaggaggaactcaaggtacccagcaattgttattttctcaagctgggcctgcaaacatgtcggctcaggctaagaactggctacctggaccttgctaccggcagcagcgagtctctacgacactgtcgcaaaacaacaacagcaactttgcttggactggtgccaccaaatatcacctgaacggaagagactctttggtaaatcccggtgtcgccatggcaacccacaaggacgacgaggaacgcttcttcccgtcgagtggagtcctgatgtttggaaaacagggtgctggaagagacaatgtggactacagcagcgttatgctaaccagcgaagaagaaattaaaaccactaaccctgtagccacagaacaatacggtgtggtggctgacaacttgcagcaaaccaatacagggcctattgtgggaaatgtcaacagccaaggagccttacctggcatggtctggcagaaccgagacgtgtacctgcagggtcccatctgggccaagattcctcacacggacggcaacttccacccttcaccgctaatgggaggatttggactgaagcacccacctcctcagatcctgatcaagaacacgccggtacctgcggatcctccaacgacgttcagccaggcgaaattggcttccttcattacgcagtacagcaccggacaggtcagcgtggaaatcgagtgggagctgcagaaggagaacagcaaacgctggaacccagagattcagtacacttcaaactactacaaatctacaaatgtggactttgctgtcaatacagagggaacttattctgagcctcgccccattggtactcgttacctcacccgtaatctgtaattgctggttaatcaataaaccgtttgattcgtttcagttgaactttggtctctgcgaagggcgaattcgtttaaacctgcaggactagtccctttagtgagg

SEQ ID NO: 572 - DNA, 2208 bp, unidentified
  source 1..2208: mol_type = unassigned DNA; note = Adeno-associated virus
atggctgccgatggttatcttccagattggctcgaggacactctctctgaaggaataagacagtggtggaagctcaaacctggcccaccaccaccaaagcccgcagagcggcataaggacgacagcaggggtcttgtgcttcctgggtacaagtacctcggacccttcaacggactcgacaagggagagccggtcaacgaggcagacgccgcggccctcgagcacgacaaggcctacgaccggcagctcgaaagcggagacaacccgtacctcaagtacaaccacgccgacgcggagtttcaggagcgtcttaaagaagatacgtcttttgggggcaacctcggacgagcagtcttccaggcgaaaaagagggttcttgaacctctgggcctggttgaggagcctgttaaaacggctccgggaaaaaagaggccggtagagcactctcctgtggagccagactcctcctcgggaaccggaaaagcgggccagcagcctgcgagaaaaagattgaattttggtcagactggagacgcagactccgtacctgacccccagcctctcggacagccaccagcagccccctctggtctgggatctactacaatggcttcaggcagtggcgcaccagtggcagacaataacgagggtgccgatggagtgggtaattcctcaggaaattggcattgcgattcccaatggctgggcgacagagtcatcaccaccagcacccgaacctgggccctgcccacctacaacaaccacctctacaagcaaatctccagccaatcaggagcctcaaacgacaaccactactttggctacagcaccccctgggggtattttgacttcaacagattccactgccacttttcaccacgtgactggcaaagactcatcaacaacagctggggattccgacccaaaagactcaacttcaagctctttaacattcaagtcaaagaggtcacgcagaatgacggtacgacgacgattgccaataaccttaccagcacggttcaagtgtttaccgactcggagtaccagctcccgtacgtcctcggctcggcgcatcaaggatgcctcccgccgttcccagcagacgtctttatggtcccacagtatggatacctcaccctgaacaacgggagtcaggcggtaggacgctcttccttttactgcctggagtactttccttctcagatgctgcgtactggaaacaactttcagttcagctacacctttgaagacgttcccttccacagcagctacgctcacagccagagtctggatcggctgctgaatcctctgatcgaccagtacctatattatctgaacaagacacaatcaaatagtggaactcttcagcagtctcggctactgtttagccaagctggacccaccagcatgtctcttcaagctaaaaactggctgcctggaccttgctacagacagcagcgtctgtcaaagcaggcaaacgacaacaacaacagcaactttccctggactgcggctacaaagtatcatctaaatggccgggactcgttggttaatccaggaccagctatggccagccacaaagacgatgaagaaaagtttttccccatgcatggaaccctgatatttggtaaacaaggaacaaatgctaacgacgcggatttggacaatgtcatgattacagatgaagaagaaatccgcaccaccaatcccgtggctacggagcagtacggatatgtgtcaaataatttgcaaaactcaaatactggtccaactactggaactgtcaatcaccaaggagcgttacctggtatggtgtggcaggatcgagacgtgtacctgcagggacccatttgggccaagattcctcacacggacgggcactttcatccttctccactaatgggaggttttgggctcaaacacccgcctcctcagatcatgatcaaaaacactcccgttccagccaatcctcctacaaacttcagttcttccaagtttgcttctttcatcacacagtattccacggggcaggtcagcgtggagatcgagtgggagctgcagaaggagaacagcaaacgctggaatcccgaaattcagtatacttccaactacaacaaatctgttaatgtggactttactgtggacactaatggtgtgtattcagagcctcgccccattggcaccagatacccgactcgtaatctgtaa

SEQ ID NO: 573 - protein, 735 aa, unidentified
  source 1..735: note = Adeno-associated virus
MAADGYLPDWLEDTLSEGIRQWWKLKPGPPPPKPAERHKDDSRGLVLPGYKYLGPFNGLDKGEPVNEADAAALEHDKAYDRQLESGDNPYLKYNHADAEFQERLKEDTSFGGNLGRAVFQAKKRVLEPLGLVEEPVKTAPGKKRPVEHSPVEPDSSSGTGKAGQQPARKRLNFGQTGDADSVPDPQPLGQPPAAPSGLGSTTMASGSGAPVADNNEGADGVGNSSGNWHCDSQWLGDRVITTSTRTWALPTYNNHLYKQISSQSGASNDNHYFGYSTPWGYFDFNRFHCHFSPRDWQRLINNSWGFRPKRLNFKLFNIQVKEVTQNDGTTTIANNLTSTVQVFTDSEYQLPYVLGSAHQGCLPPFPADVFMVPQYGYLTLNNGSQAVGRSSFYCLEYFPSQMLRTGNNFQFSYTFEDVPFHSSYAHSQSLDRLLNPLIDQYLYYLNKTQSNSGTLQQSRLLFSQAGPTSMSLQAKNWLPGPCYRQQRLSKQANDNNNSNFPWTAATKYHLNGRDSLVNPGPAMASHKDDEEKFFPMHGTLIFGKQGTNANDADLDNVMITDEEEIRTTNPVATEQYGYVSNNLQNSNTGPTTGTVNHQGALPGMVWQDRDVYLQGPIWAKIPHTDGHFHPSPLMGGFGLKHPPPQIMIKNTPVPANPPTNFSSSKFASFITQYSTGQVSVEIEWELQKENSKRWNPEIQYTSNYNKSVNVDFTVDTNGVYSEPRPIGTRYPTRNL

SEQ ID NO: 574 - DNA, 2208 bp, unidentified
  source 1..2208: mol_type = unassigned DNA; note = Adeno-associated virus
atggctgccgatggttatcttccagattggctcgaggacactctctctgaaggaataagacagtggtggaagctcaaacctggcccaccaccaccaaagcccgcagagcggcataaggacgacagcaggggtcttgtgcttcctgggtacaagtacctcggacccttcaacggactcgacaagggagagccggtcaacgaggcagacgccgcggccctcgagcacgacaaggcctacgaccggcagctcgacagcggagacaacccgtacctcaagtacaaccacgccgacgcggagtttcaggagcgtcttaaagaagatacgtcttttgggggcaacctcggacgagcagtcttccaggccaaaaagaggattcttgaacctctgggcctggttgaggaacctgttaagacggctccgggagaaaagaggccggtagagcactctcctgcggagccagactcctcctcgggaaccggaaaagcgggccagcagcctgcaagaaagagattgaattttggccagactggagacgcagactcagtacctgacccccagcctctcggacagccaccagcagccccctctggtctgggaactaatacgatggcttcaggcagtggcgcaccaatggcagacaataacgagggcgccgacggagtgggtaattcctcgggaaattggtattgcgattccacatggatgggcgacagagtcatcaccaccagcacccgcacctgggccctgcccacctacaacaaccatctgtacaagcaaatctccagccagtctggagccagcaacgacaaccactactttggctacagcaccccctgggggtattttgacttcaacagattccactgccacttctccccacgtgactggcaaagactcatcaacaacaactggggattccggcccaagagactcagcttcaagctctttaacattcaagtcaaagaggtcacgcagaatgacggtacgacgacgattgccaataaccttaccagcacggttcaggtgtttactgactcggagtaccagctcccgtacgtcctcggctcggcgcatcaaggatgcctcccgccgttcccagcagacgtcttcatggtgccacagtatggatacctcaccctgaacaacggcagtcaggcggtaggacgctcttccttttactgcctggagtactttccttctcagatgcttcgtaccggaaacaactttaccttcagctacacctttgaagacgttcctttccatagcagctacgctcacagccaaagtctggaccgtctcatgaatcctctcatcgaccagtacctgtattacttgagcagaacaaacactccaagcggaaccaccacgatgtccaggcttcagttttctcaggccggagcaagtgacattcgggaccagtctagaaactggcttcctggaccctgttaccgccagcagcgagtatcaaagacagctgcggacaacaacaacagtgattactcgtggactggagctaccaagtaccacctcaatggaagagactctctggtgaatccgggcccagctatggccagccacaaggacgatgaagaaaaatattttcctcagagcggggttctcatctttggaaaacaagactcgggaaaaactaatgtggacattgaaaaggttatgattacagacgaagaggaaatcaggaccaccaatcccgtggctacggagcagtatggttctgtatctaccaacctccagagcggcaacacacaagcagctacctcagatgtcaacacacaaggcgttcttccaggcatggtctggcaggacagagacgtgtacctgcaggggcccatctgggcaaagattccacacacggacggacattttcacccctctcccctcgtgggcggattcggacttaaacaccctcctccacaaattctcatcaagaacaccccggtacctgcgaatccttcgaccactttcagtgcggcaaagtttgcttccttcatcacacagtactccacggggcaggtcagcgtggagatcgagtgggagctgcagaaggagaacagcaaacgctggaatcccgaaattcagtacacttccaactacaacaaatctgttaatgtggactttactgtggacactaatggtgtgtattcagagcctcgccccattggcaccagatacctgactcgtaatctgtaa

SEQ ID NO: 575 - protein, 735 aa, unidentified
  source 1..735: note = Adeno-associated virus
MAADGYLPDWLEDTLSEGIRQWWKLKPGPPPPKPAERHKDDSRGLVLPGYKYLGPFNGLDKGEPVNEADAAALEHDKAYDRQLDSGDNPYLKYNHADAEFQERLKEDTSFGGNLGRAVFQAKKRILEPLGLVEEPVKTAPGEKRPVEHSPAEPDSSSGTGKAGQQPARKRLNFGQTGDADSVPDPQPLGQPPAAPSGLGTNTMASGSGAPMADNNEGADGVGNSSGNWYCDSTWMGDRVITTSTRTWALPTYNNHLYKQISSQSGASNDNHYFGYSTPWGYFDFNRFHCHFSPRDWQRLINNNWGFRPKRLSFKLFNIQVKEVTQNDGTTTIANNLTSTVQVFTDSEYQLPYVLGSAHQGCLPPFPADVFMVPQYGYLTLNNGSQAVGRSSFYCLEYFPSQMLRTGNNFTFSYTFEDVPFHSSYAHSQSLDRLMNPLIDQYLYYLSRTNTPSGTTTMSRLQFSQAGASDIRDQSRNWLPGPCYRQQRVSKTAADNNNSDYSWTGATKYHLNGRDSLVNPGPAMASHKDDEEKYFPQSGVLIFGKQDSGKTNVDIEKVMITDEEEIRTTNPVATEQYGSVSTNLQSGNTQAATSDVNTQGVLPGMVWQDRDVYLQGPIWAKIPHTDGHFHPSPLVGGFGLKHPPPQILIKNTPVPANPSTTFSAAKFASFITQYSTGQVSVEIEWELQKENSKRWNPEIQYTSNYNKSVNVDFTVDTNGVYSEPRPIGTRYLTRNL

SEQ ID NO: 576 - DNA, 2209 bp, unidentified
  source 1..2209: mol_type = unassigned DNA; note = Adeno-associated virus
atggctgccgatggttatcctccagattggctcgaggacactctctctgaagggataagacagtggtggaagctcaaacctggcccaccaccaccaaagcccgcagagcggcataaggacgacagcaggggtcttgtgcttcctgggtacaagtacctcggacccttcaacggactcgacaagggggagccggtcaacgaggcagacgccgcggccctcgagcacgacaaggcctacgaccggcagctcgacagcggagacaacccgtacctcaagtacaaccacgccgacgcagagtttcaggagcgccttaaagaagatacgtcttttgggggcaacctcggacgagcagtcttccaggcgaaaaagagggttcttgaacctctgggcctggttgaggaacctgttaagacggctccgggaaaaaagaggccggtagagcactctcctgtggagccagactcctcctcgggaaccggaaaagcgggccagcggcctgcaagaaaaagattaaattttggtcagactggagacgcagactccgtacctgacccccagcctctcggacagccaccagcagccccctctggtctgggatctactacaatggctacaggcagtggcgcaccaatggcagacaataacgagggtgccgatggagtgggtaattcctcaggaaattggcattgcgattcccaatggctgggcgacagagtcatcaccaccagcacccgaacctgggccctgcccacatacaacaaccacctctacaagcaaatctccagccaatcaggagccagcaacgacaaccactactttggctacagcaccccctgggggtattttgacttcaacagattccactgccacttttcaccacgtgactggcaaagactcatcaacaacaactggggattccggcccaaaagactcaacttcaagctctttaatattcaagtcaaagaggtcacgcagaatgacggtacgacgacgattgccaataaccttaccagcacggttcaggtgtttactgactcggagtaccagctcccgtacgtcctgggctcggcgcatcaaggatgcctcccgccgtttccagcggacgtcttcatggtcccacagtatggatacctcaccctgaacaacgggagtcaggcggtaggacgctcttccttttactgcctggagtactttccttctcagatgctgcgtactggaaacaactttcagttcagctacacttttgaagacgtgcctttccacagcagctacgctcacagccagagtctggatcggctgatgaatcctctgatcgaccagtacctgtattatctgaacaagacacaaacaaatagtggaactcttcagcagtctcggctactgtttagccaagctggaccaaccaacatgtctcttcaagctaaaaactggctgcctggaccttgctacagacagcagcgtctgtcaaaacaggcaaacgacaacaacaacagcaactttccctggactgcagctacaaagtatcatctaaatggccgggactcgttggttaatccaggaccagctatggccagtcacaaggatgacgaagaaaagtttttccccatgcatggaaccctgatatttggtaaacaaggaacaaatgccaacgacgcggatttggaaaatgtcatgattacagatgaagaagaaatcagggccaccaatcccgtggctacggagcagtacgggactgtgtcaaataatttgcaaaactcaaacactggtccaactactggaactgtcaatcgccaaggagcgttacctggtatggtgtggcaggatcgagacgtgtacctgcagggacccatttgggccaagattcctcacaccgatggacactttcatccttctccactgatgggaggttttggactcaaacacccgcctcctcagatcatgatcaaaaacactcccgttccagccaatcctcccacaaacttcagttctgccaagtttgcttctttcatcacacagtattccacgggacaggtcagcgtggagatcgagtgggagctgcagaaggagaacagcaaacgctggaatcccgaaattcagtacacttccaactacaacaagtctgttaatgtggactttactgtggacactaatggtgtgtattcagagcctcgccccattggcaccagatacctgactcgtaatctgtaat

SEQ ID NO: 577 - protein, 735 aa, unidentified
  source 1..735: note = Adeno-associated virus
MAADGYPPDWLEDTLSEGIRQWWKLKPGPPPPKPAERHKDDSRGLVLPGYKYLGPFNGLDKGEPVNEADAAALEHDKAYDRQLDSGDNPYLKYNHADAEFQERLKEDTSFGGNLGRAVFQAKKRVLEPLGLVEEPVKTAPGKKRPVEHSPVEPDSSSGTGKAGQRPARKRLNFGQTGDADSVPDPQPLGQPPAAPSGLGSTTMATGSGAPMADNNEGADGVGNSSGNWHCDSQWLGDRVITTSTRTWALPTYNNHLYKQISSQSGASNDNHYFGYSTPWGYFDFNRFHCHFSPRDWQRLINNNWGFRPKRLNFKLFNIQVKEVTQNDGTTTIANNLTSTVQVFTDSEYQLPYVLGSAHQGCLPPFPADVFMVPQYGYLTLNNGSQAVGRSSFYCLEYFPSQMLRTGNNFQFSYTFEDVPFHSSYAHSQSLDRLMNPLIDQYLYYLNKTQTNSGTLQQSRLLFSQAGPTNMSLQAKNWLPGPCYRQQRLSKQANDNNNSNFPWTAATKYHLNGRDSLVNPGPAMASHKDDEEKFFPMHGTLIFGKQGTNANDADLENVMITDEEEIRATNPVATEQYGTVSNNLQNSNTGPTTGTVNRQGALPGMVWQDRDVYLQGPIWAKIPHTDGHFHPSPLMGGFGLKHPPPQIMIKNTPVPANPPTNFSSAKFASFITQYSTGQVSVEIEWELQKENSKRWNPEIQYTSNYNKSVNVDFTVDTNGVYSEPRPIGTRYLTRNL

SEQ ID NO: 578 - DNA, 2208 bp, unidentified
  source 1..2208: mol_type = unassigned DNA; note = Adeno-associated virus
atggctgccgatggttatcttccagattggctcgaggacactctctctgaaggaataagacagtggtggaagctcaaacctggcccaccaccaccaaagcccgcagagcggcataaggacgacagcaggggtcttgtgcttcctgggtacaggtacctcggacccttcaacggactcgacaagggagagccggtcaacgaggcagacgccgcggccctcgagcacgacaaggcctacgaccggcagctcgacagcggagacaacccgtacctcaagtacaaccacgtcgacgcggagtttcaggagcgtcttaaagaagatacgtcttttgggggcaacctcggacgagcagtcttccaggccaaaaagaggattcttgaacctctgggcctggttgaggaacctgttaaggcggctccgggagaaaagaggccggtagagcactctcctgcggagccagactcctcctcgggaaccggaaaagcgggccagcagcctgcaagaaagagattgaattttggtcagactggagacgcagactcagtacctgacccccagcctctcggacagccaccagcagccccctctggtctgggaactaatacgatggcttcaggcagtggcgcaccaatggcagacaataacgagggcgccgacggagtgggtaattcctcgggaaattggcattgcgattccacatggatgggcgacagagtcatcaccaccagcacccgcacctgggccctgcccacctacaacaaccatctgtacaagcaaatctccagccagtctggagccagcaacgacaaccactactttggctacagcaccccctgggggcattttgacttcaacagattccactgccacttctccccacgtgactggcaaagactcatcaacaacaactggggattccggcccaagagactcagcttcaagctctttaacattcaagtcaaagaggtcacgcagaatgacggtacgacgacgattgccaataaccttaccagcacggttcaggtgtttactgactcggagtaccagctcccgtacgtcctcggctcggcgcatcaaggatgcctcccgccgttcccagcagacgtcttcatggtgccacagtatggatacctcaccctgaacaacggcagtcaggcggtaggacgctcttccttttactgcctggagtactttccttctcagatgcttcgtaccggaaacaactttaccttcagctacacctttgaagacgttcctttccatagcagctacgctcacagccaaagtctggaccgtctcatgaatcctctcatcgaccagtacctgtattacttgagcagaacaaacactccaagcggaaccaccacgatgtccaggcttcagttttctcaggccggagcaagtgacattcgggaccagtctagaaactggcttcctggaccctgttaccgccagcagcgagtatcaaagacagctgcggacaacaacaacagtgattactcgtggactggagctaccaagtaccacctcaatggaagagactctctggtgaatccgggcccagctatggccagccacaaggacgatgaagaaaaatattttcctcagagcggggttctcatctttggaaaacaagactcgggaaaaactaatgtggacattgaaaaggttatgattacagacgaagaggaaatcaggaccaccaatcccgtggctacggagcagtatggttctgtatctaccaacctccagagcggcaacacacaagcagctacctcagatgtcaacacacaaggcgttcttccaggcatggtctggcaggacagagacgtgtacctgcaggggcccatctgggcaaagattccacacacggacggacattttcacccctctccccccatgggcggattcggacttaaacaccctcctccacaaattctcatcaagaacaccccggtacctgcgaatccttcgaccactttcagtgcggcaaagtttgcttccttcatcacacagtactccacggggcaggtcagcgtggagatcgagtgggagctgcagaaggagaacagcaaacgctggaatcccgaaattcagtacacttccaactacaacaaatctgttaatgtggactttactgtggacactaatggtgtgtattcagagcctcgccccattggcgccagatacctgactcgtaatctgtaa

SEQ ID NO: 579 - protein, 735 aa, unidentified
  source 1..735: note = Adeno-associated virus
MAADGYLPDWLEDTLSEGIRQWWKLKPGPPPPKPAERHKDDSRGLVLPGYRYLGPFNGLDKGEPVNEADAAALEHDKAYDRQLDSGDNPYLKYNHVDAEFQERLKEDTSFGGNLGRAVFQAKKRILEPLGLVEEPVKAAPGEKRPVEHSPAEPDSSSGTGKAGQQPARKRLNFGQTGDADSVPDPQPLGQPPAAPSGLGTNTMASGSGAPMADNNEGADGVGNSSGNWHCDSTWMGDRVITTSTRTWALPTYNNHLYKQISSQSGASNDNHYFGYSTPWGHFDFNRFHCHFSPRDWQRLINNNWGFRPKRLSFKLFNIQVKEVTQNDGTTTIANNLTSTVQVFTDSEYQLPYVLGSAHQGCLPPFPADVFMVPQYGYLTLNNGSQAVGRSSFYCLEYFPSQMLRTGNNFTFSYTFEDVPFHSSYAHSQSLDRLMNPLIDQYLYYLSRTNTPSGTTTMSRLQFSQAGASDIRDQSRNWLPGPCYRQQRVSKTAADNNNSDYSWTGATKYHLNGRDSLVNPGPAMASHKDDEEKYFPQSGVLIFGKQDSGKTNVDIEKVMITDEEEIRTTNPVATEQYGSVSTNLQSGNTQAATSDVNTQGVLPGMVWQDRDVYLQGPIWAKIPHTDGHFHPSPPMGGFGLKHPPPQILIKNTPVPANPSTTFSAAKFASFITQYSTGQVSVEIEWELQKENSKRWNPEIQYTSNYNKSVNVDFTVDTNGVYSEPRPIGARYLTRNL

SEQ ID NO: 580 - DNA, 2208 bp, unidentified
  source 1..2208: mol_type = unassigned DNA; note = Adeno-associated virus
atggctgccgatggttatcttccagattggctcgaggacaccctctctgaaggaataagacagtggtggaagctcaaacctggcccaccaccaccaaagcccgcagagcggcataaggacgacagcaggggtcttgtgcttcctgggtacaagtacctcggacccttcaacggactcgacaagggagagccggtcaacgaggcagacgccgcggccctcgagcacgacaaggcctacgaccggcagctcgacagcggagataacccgtacctcaagtacaaccacgccgacgcggagtttcaggagcgccttaaagaggatacgtcttttgggggcaacctcggacgagcagtcttccaggccaaaaagaggattcttgaacctctgggcctggttgaggaacctgttaagacggctccgggaaaaaagaggccggtagagcactctcctgcggagccagactcctcctcgggaaccggaaaagcgggccagcagcctgcaagaaagagattgaattttggtcagactggagacgcagactcagtacctgacccccggcctctcggacagccaccagcagccccctctggtctgggaactaatacgatggcttcaggcagtggcgcaccaatggcagacaataacgagggcgccgacggagtgggtaattcctcgggaaattggcattgcgattccacatggatgggcgacagagtcatcaccaccagcacccgcacctgggccctgcccacctacaacaaccatctgtacaagcaaatctccagccagtctggagccagcaacgacaaccactactttggctacagcaccccctgggggtattttgacttcaacagattccactgccacttctccccacgtgactggcaaagactcatcaacaacaactggggattccggcccaagagactcagcttcaagctctttaacattcaagtcaaagaggtcacgcagaatgacggtacgacgacgattgccaataaccttaccagcacggttcaggtgtttactgactcggagtaccagctcccgtacgtcctcggctcggcgcatcaaggatgcctcccgccgttcccagcagacgtcttcatggtgccacagtatggatacctcaccctgaacaacggcagtcaggcggtaggacgctcttccttttactgcctggagtactttccttctcagatgcttcgtaccggaaacaactttaccttcagctacacctttgaagacgttcctttccatagcagctacgctcacagccaaagtctggaccgtctcatgaatcctctcatcgaccagtacctgtattacttgagcagaacaaacactccaagcggaaccaccacgatgtccaggcttcagttttctcaggccggagcaagtgacattcgggaccagtctagaaactggcttcctggaccctgttaccgccagcagcgagtatcaaagacagctgcggacaacaacaacagtgattactcgtggactggagctaccaagtaccacctcaatggaagagactctctggtgaatccgggcccagctatggccagccacaaggacgatgaagaaaaatattttcctcagagcggggttctcatctttggaaaacaagactcgggaaaaactaatgtggacattgaaaaggttatgattacagacgaagaggaaatcaggaccaccaatcccgtggctacggagcagtatggttctgtatctaccaacctccagagcggcaacacacaagcagctacctcagatgtcaacacacaaggcgttcttccaggcatggtctggcaggacagagacgtgtacctgcaggggcccatctgggcaaagattccacacacggacggacattttcacccctctcccctcatgggcggattcggacttaaacaccctcctccacaaattctcatcaagaacaccccggtacctgcgaatccttcgaccactttcagtgcggcaaagtttgcttccttcatcacacagtactccacggggcaggtcagcgtggagatcgagtgggagctgcagaaggagaacagcaaacgctggaatcccgaaattcagtacacttccaactacaacaaatctgttaatgtggactttactgtggacactaatggtgtgtattcagagcctcgccccattggcaccagatacctgactcgtaatctgtaa

SEQ ID NO: 581 - protein, 735 aa, unidentified
  source 1..735: note = Adeno-associated virus
MAADGYLPDWLEDTLSEGIRQWWKLKPGPPPPKPAERHKDDSRGLVLPGYKYLGPFNGLDKGEPVNEADAAALEHDKAYDRQLDSGDNPYLKYNHADAEFQERLKEDTSFGGNLGRAVFQAKKRILEPLGLVEEPVKTAPGKKRPVEHSPAEPDSSSGTGKAGQQPARKRLNFGQTGDADSVPDPRPLGQPPAAPSGLGTNTMASGSGAPMADNNEGADGVGNSSGNWHCDSTWMGDRVITTSTRTWALPTYNNHLYKQISSQSGASNDNHYFGYSTPWGYFDFNRFHCHFSPRDWQRLINNNWGFRPKRLSFKLFNIQVKEVTQNDGTTTIANNLTSTVQVFTDSEYQLPYVLGSAHQGCLPPFPADVFMVPQYGYLTLNNGSQAVGRSSFYCLEYFPSQMLRTGNNFTFSYTFEDVPFHSSYAHSQSLDRLMNPLIDQYLYYLSRTNTPSGTTTMSRLQFSQAGASDIRDQSRNWLPGPCYRQQRVSKTAADNNNSDYSWTGATKYHLNGRDSLVNPGPAMASHKDDEEKYFPQSGVLIFGKQDSGKTNVDIEKVMITDEEEIRTTNPVATEQYGSVSTNLQSGNTQAATSDVNTQGVLPGMVWQDRDVYLQGPIWAKIPHTDGHFHPSPLMGGFGLKHPPPQILIKNTPVPANPSTTFSAAKFASFITQYSTGQVSVEIEWELQKENSKRWNPEIQYTSNYNKSVNVDFTVDTNGVYSEPRPIGTRYLTRNL

SEQ ID NO: 582 - DNA, 2208 bp, unidentified
  source 1..2208: mol_type = unassigned DNA; note = Adeno-associated virus
atggctgccgatggttatcttccagattggctcgaggacactctctctgaaggaataagacagtggtggaagctcaaacctggcccaccaccaccaaagcccgcagagcggcataaggacgacagcaggggtcttgtgcttcctgggtacaagtacctcggacccttcaacggactcgacaagggagagccggtcaacgaggcagacgccgcggccctcgagcacgacaaggcctacgaccggcagctcgacagcggagacaacccgtacctcaagtacaaccacgccgacgcggagtttcaggagcgccttaaaggagatacgtcttttgggggcaacctcggacgagcagtcttccaggccaaaaagaggattcttgaacctctgggcctggttgaggaacctgttaagacggctccgggaaaaaagaggccggtagagcactctcctgcggagccagactcctcctcgggaaccggaaaagcgggccagcagcctgcaagaaagagattgaattttggtcagactggagacgcagactcagtacctgacccccagcctctcggacagccaccagcagccccctctggtctgggaactaatacgatggcttcaggcagtggcgcaccaatggcagacaataacgagggcgccgacggagtgggtaattcctcgggaaattggcattgcgattccacatggatgggcggcagagtcatcaccaccagcacccgcacctgggccctgcccacctacaacaaccatctgtacaagcaaatctccagccagtctggagccagcaacgacaaccactactttggctacagcaccccctgggggtattttgacttcaacagattccactgccacttctccccacgtgactggcaaagactcatcaacaacaactggggattccggcccaagagactcagcttcaagctctttaacattcaagtcaaagaggtcacgcagaatgacggtacgacgacgattgccaataaccttaccagcacggttcaggtgtttactgactcggagtaccagctcccgtacgtcctcggctcggcgcatcaaggatgcctcccgccgttcccagcagacgtcttcatggtgccacagtatggatacctcaccctgaacaacggcagtcaggcggtaggacgctcttccttttactgcctggagtactttccttctcagacgcttcgtaccggaaacaactttaccttcagctacacctttgaagacgttcctttccatagcagctacgctcacagccaaagtctggaccgtctcatgaatcctctcatcgaccagtacctgtattacttgagcagaacaaacactccaagcggaaccaccacgatgtccaggcttcagttttctcaggccggagcaagtgacattcgggaccagtctagaaactggcttcctggaccctgttaccgccagcagcgagtatcaaagacagctgcggacaacaacaacagtgattactcgtggactggagctaccaagtaccacctcaatggaagagactctctggtgaatccgggcccagctatggccagccacaaggacgatgaagaaaaatattttcctcagagcggggttctcatctttggaaaacaagactcgggaaaaactaatgtggacattgaaaaggttatgattacagacgaagaggaaatcaggaccaccaatcccgtggctacggagcagtatggttctgtatctaccaacctccagagcggcaacacacaagcagctacctcagatgtcaacacacaaggcgttcttccaggcatggtctggcaggacagagacgtgtacctgcaggggcccatctgggcaaagattccacacacggacggacattttcacccctctcccctcatgggcggattcggacttaaacaccctcctccacaaattctcatcaagaacaccccggtacctgcgaatccttcgaccactttcagtgcggcaaagtttgcttccttcatcacacagtactccacggggcaggtcagcgtggagatcgagtgggagctgcagaaggagaacagcaaacgctggaatcccgaaattcagtacacttccaactacaacaaatctgttaatgtggactttactgtggacactaatggtgtgtattcagagcctcgccccattggcaccagatacctgactcgtaatctgtaa

SEQ ID NO: 583 - protein, 735 aa, unidentified
  source 1..735: note = Adeno-associated virus
MAADGYLPDWLEDTLSEGIRQWWKLKPGPPPPKPAERHKDDSRGLVLPGYKYLGPFNGLDKGEPVNEADAAALEHDKAYDRQLDSGDNPYLKYNHADAEFQERLKGDTSFGGNLGRAVFQAKKRILEPLGLVEEPVKTAPGKKRPVEHSPAEPDSSSGTGKAGQQPARKRLNFGQTGDADSVPDPQPLGQPPAAPSGLGTNTMASGSGAPMADNNEGADGVGNSSGNWHCDSTWMGGRVITTSTRTWALPTYNNHLYKQISSQSGASNDNHYFGYSTPWGYFDFNRFHCHFSPRDWQRLINNNWGFRPKRLSFKLFNIQVKEVTQNDGTTTIANNLTSTVQVFTDSEYQLPYVLGSAHQGCLPPFPADVFMVPQYGYLTLNNGSQAVGRSSFYCLEYFPSQTLRTGNNFTFSYTFEDVPFHSSYAHSQSLDRLMNPLIDQYLYYLSRTNTPSGTTTMSRLQFSQAGASDIRDQSRNWLPGPCYRQQRVSKTAADNNNSDYSWTGATKYHLNGRDSLVNPGPAMASHKDDEEKYFPQSGVLIFGKQDSGKTNVDIEKVMITDEEEIRTTNPVATEQYGSVSTNLQSGNTQAATSDVNTQGVLPGMVWQDRDVYLQGPIWAKIPHTDGHFHPSPLMGGFGLKHPPPQILIKNTPVPANPSTTFSAAKFASFITQYSTGQVSVEIEWELQKENSKRWNPEIQYTSNYNKSVNVDFTVDTNGVYSEPRPIGTRYLTRNL

SEQ ID NO: 584 - DNA, 2208 bp, unidentified
  source 1..2208: mol_type = unassigned DNA; note = Adeno-associated virus
atggctgccgatggttatcttccagattggctcgaggacactctctctgaaggaataagacagtggtggaagctcaaacctggcccaccaccaccaaagcccgcagagcggcataaggacgacagcaggggtcttgtgcttcctgggtacaagtacctcggacccttcaacggactcgacaagggagagccggtcaacgaggcagacgccgcggccctcgagcacgacaaggcctacgaccggcagctcgacagcggagacaacccgtacctcaagtacaaccacgccgacgcggagtttcaggagcgtcttaaagaagatacgtcttttgggggcaacctcggacgagcagtcttccaggccaaaaagaggattcttgaacctctgggcctggttgaggaacctgttaagacggctccgggaaaaaagaggccggtagagcactctcctgcggagccagactcctcctcgggaaccggaaaagcgggccagcagcctgcaagaaagagattgaattttggtcagactggagacgcagactcagtacctgacccccagcctctcggacagccaccagcagccccctctggtctgggaactaatacgatggcttcaggcagtggcgcaccaatggcagacaataacgagggcgccgacggagtgggtaattcctcgggaaattggcattgcgattccacatggatgggcgacagagtcatcaccaccagcacccgcacctgggccctgcccacctgcaacaaccatctgtacaagcaaatctccagccagtctggagccagcaacgacaaccactactttggctacagcaccccctgggggtattttgacttcaacagattccactgccacttctccccacgtgactggcaaagactcatcaacaacaactggggattccggcccaagagactcagcttcaagctctttaacattcaagtcaaagaggtcacgcagaatgacggtacgacgacgattgccaataaccttaccagcacggttcaggtgtttactgactcggagtaccagctcccgtacgtcctcggctcggcgcatcaaggatgcctcccgccgttcccagcagacgtcttcatggtgccacagtatggatacctcaccctgaacaacggcagtcaggcggtaggacgctcttccttttactgcctggagtattttccttctcagatgcttcgtaccggaaacaactttaccttcagctacacctttgaagacgttcctttccatagcagctacgctcacagccaaagtctggaccgtctcatgaatcctctcatcgaccagtacctgtattacttgagcagaacaaacactccaagcggaaccaccacgatgtccaggcttcagttttctcaggccggagcaagtgacattcgggaccagtctagaaactggcttcctggaccctgttaccgccagcagcgagtatcaaagacagctgcggacaacaacaacagtgattactcgtggactggagctaccaagtaccacctcaatggaagagactctctggtgaatccgggcccagctatggccagccacaaggacgatgaagaaaaatattttcctcagagcggggttctcatctttggaaaacaagactcgggaaaaactaatgtggacattgaaaaggttatgattacagacgaagaggaaatcaggaccaccaatcccgtggctacggagcagtatggttctgtatctacctacctccagagcggcaacacacaagcagctacctcagatgtcaacacacaaggcgttcttccaggcatggtctggcaggacagagacgtgtacctgcgggggcccatctgggcaaagattccacacacggacggacattttcacccctctcccctcatgggcggatttggacttaaacaccctcctccacaaattctcatcaagaacaccccggtacctgcgaatccttcgaccactttcagtgcggcaaagtttgcttccttcatcacacagtactccacggggcaggtcagcgtggagatcgagtgggagctgcagaaggagaacagcaaacgctggaatcccgaaattcagtacacttccaactacaacaaatctgttaatgtggactttactgtggacactaatggtgtgtattcagagcctcgccccattggcaccagatacctgactcgtaatctgtaa

SEQ ID NO: 585 - protein, 735 aa, unidentified
  source 1..735: note = Adeno-associated virus
MAADGYLPDWLEDTLSEGIRQWWKLKPGPPPPKPAERHKDDSRGLVLPGYKYLGPFNGLDKGEPVNEADAAALEHDKAYDRQLDSGDNPYLKYNHADAEFQERLKEDTSFGGNLGRAVFQAKKRILEPLGLVEEPVKTAPGKKRPVEHSPAEPDSSSGTGKAGQQPARKRLNFGQTGDADSVPDPQPLGQPPAAPSGLGTNTMASGSGAPMADNNEGADGVGNSSGNWHCDSTWMGDRVITTSTRTWALPTCNNHLYKQISSQSGASNDNHYFGYSTPWGYFDFNRFHCHFSPRDWQRLINNNWGFRPKRLSFKLFNIQVKEVTQNDGTTTIANNLTSTVQVFTDSEYQLPYVLGSAHQGCLPPFPADVFMVPQYGYLTLNNGSQAVGRSSFYCLEYFPSQMLRTGNNFTFSYTFEDVPFHSSYAHSQSLDRLMNPLIDQYLYYLSRTNTPSGTTTMSRLQFSQAGASDIRDQSRNWLPGPCYRQQRVSKTAADNNNSDYSWTGATKYHLNGRDSLVNPGPAMASHKDDEEKYFPQSGVLIFGKQDSGKTNVDIEKVMITDEEEIRTTNPVATEQYGSVSTYLQSGNTQAATSDVNTQGVLPGMVWQDRDVYLRGPIWAKIPHTDGHFHPSPLMGGFGLKHPPPQILIKNTPVPANPSTTFSAAKFASFITQYSTGQVSVEIEWELQKENSKRWNPEIQYTSNYNKSVNVDFTVDTNGVYSEPRPIGTRYLTRNL

SEQ ID NO: 586 - DNA, 2208 bp, unidentified; identical to SEQ ID NO: 580
  source 1..2208: mol_type = unassigned DNA; note = Adeno-associated virus

SEQ ID NO: 587 - protein, 735 aa, unidentified; identical to SEQ ID NO: 581
  source 1..735: note = Adeno-associated virus

SEQ ID NO: 588 - DNA, 2208 bp, unidentified
  source 1..2208: mol_type = unassigned DNA; note = Adeno-associated virus
atggctgccgatggttatcttccagattggctcgaggacactctctctgaaggaataagacagtggtggaagctcaaacctggcccaccaccaccaaagcccgcagagcggcataaggacggcagcaggggtcttgtgcttcctgggtacaagtacctcggacccttcaacggactcgacaagggagagccggtcaacgaggcagacgccgcggccctcgagcacgacaaggcctacgaccggcagctcaacagcggagacaacccgtacctcaagtacaaccacgccgacgcggagtttcaggagcgccttaaagaagatacgtcttttgggggcaacctcggacgagcagtcttccaggcaaaaaagagggttcttgaacctctgggcctggttgaggagcctgttaaaacggctccgggaaaaaagagaccggtagagcactctcctgcggagccagactcctcctcgggaaccggaaaagcgggccagcagcctgcaagaaagagattgaattttggtcagactggagacgcagactccgtacctgacccccagcctctcggacagccaccagcagccccctctggtctgggatctactacaatggctacaggcagtggcgcaccaatggcagacaataacgagggtgccgatggagtgggtaattcctcaggaaattggcattgcgattcccaatggctgggcgacagagtcatcaccacaagcactcgaacctgggccctgcccacctacaacaaccacctctacaagcaaatctccagccaatcaggagcctcaaacgacaaccactattttggctacagcaccccttgggggtattttgacttcaacagattccactgccacttttcaccacgtgactggcaaagactcatcaacaacaactggggattccgacccaagagactcaacttcaagctctttaacattcaagtcaaagaggtcacgcagaatgacggtacgacgacgattgccaataaccttaccagcacggttcaggtgtttactgactcggagtaccagctcccgtacgtcctcggctcggcgcatcaaggatgcctcccgccgttcccagcggacgtcttcatggtcccacagtatggatacctcaccctgaacaacgggagtcaggcggtaggacgctctcccttttactgcctggagtactttccttctcagatgctgcgtactggaaacaactttcagttcagctacacttttgaagacgtgcctttccacagcagctacgctcacagccagagtctggatcggctgatgaatcctctgatcgaccagtacctgtattatctgaacaagacacaaacaaatagtggaactcttcagcagtctcggctactgtttagccaagctggacccaccaacatgtctcttcaagctaaaaactggctgcctggaccttgctacagacagcagcgtctgtcaaagcaggcaaacgacaacaacaacagcaactttccctggactgcagctacaaagtatcatctaaatggccgggactcgttggttaatccaggaccagctatggccagtcacaaggatgacgaagaaaagtttttccccatgcatggaaccctgatatttggtaaacaaggaacaaatgccaacgacgcggatttggaaaatgtcatgattacagatgaagaagaaatcaggaccaccaatcccgtggctacggagcagtacgggactgtgtcaaataatttgcaaaactcaaacactggtccaactactggaactgtcaatcaccaaggagcgttacctggtatggtgtggcaggatcgagatgtgtaccttcagggacccatttgggccaagattcctcacaccgatggacactttcatccttctccactgatgggaggttttggactcaaacacccgcctcctcagattatgatcaaaaacactcccgttccagccaatcctcctacaaacttcagttctgccaagtttgcttctttcatcacacagtattccacggggcaggtcagcgtggagatcgagtgggagctgcagaaggagaacagcaaacgctggaatcccgaaattcagtacacttccaactacaacaaatctgttaatgtggactttactgtggacaataatggcgtgtactcagagcctcgccccattggcaccagatacctgactcgtaatctgtaa

SEQ ID NO: 589 - protein, 735 aa, unidentified
  source 1..735: note = Adeno-associated virus
MAADGYLPDWLEDTLSEGIRQWWKLKPGPPPPKPAERHKDGSRGLVLPGYKYLGPFNGLDKGEPVNEADAAALEHDKAYDRQLNSGDNPYLKYNHADAEFQERLKEDTSFGGNLGRAVFQAKKRVLEPLGLVEEPVKTAPGKKRPVEHSPAEPDSSSGTGKAGQQPARKRLNFGQTGDADSVPDPQPLGQPPAAPSGLGSTTMATGSGAPMADNNEGADGVGNSSGNWHCDSQWLGDRVITTSTRTWALPTYNNHLYKQISSQSGASNDNHYFGYSTPWGYFDFNRFHCHFSPRDWQRLINNNWGFRPKRLNFKLFNIQVKEVTQNDGTTTIANNLTSTVQVFTDSEYQLPYVLGSAHQGCLPPFPADVFMVPQYGYLTLNNGSQAVGRSPFYCLEYFPSQMLRTGNNFQFSYTFEDVPFHSSYAHSQSLDRLMNPLIDQYLYYLNKTQTNSGTLQQSRLLFSQAGPTNMSLQAKNWLPGPCYRQQRLSKQANDNNNSNFPWTAATKYHLNGRDSLVNPGPAMASHKDDEEKFFPMHGTLIFGKQGTNANDADLENVMITDEEEIRTTNPVATEQYGTVSNNLQNSNTGPTTGTVNHQGALPGMVWQDRDVYLQGPIWAKIPHTDGHFHPSPLMGGFGLKHPPPQIMIKNTPVPANPPTNFSSAKFASFITQYSTGQVSVEIEWELQKENSKRWNPEIQYTSNYNKSVNVDFTVDNNGVYSEPRPIGTRYLTRNL

SEQ ID NO: 590 - DNA, 2208 bp, unidentified
  source 1..2208: mol_type = unassigned DNA; note = Adeno-associated virus
atggctgccgatggttatcttccagattggctcgaggacactctctctgaaggaataagacagtggtggaagctcaaacctggcccaccaccaccaaagcccgcagagcggcataaggacgacagcaggggtcttgtgcttcctgggtacaagtacctcggacccttcaacggactcgacaagggagagccggtcaacgaggcagacgccgcggccctcgagcacgacaaggcctacgaccggcagctcgacagcggagacaacccgtacctcaagtacaaccacgccgacgcggagtttcaggagcgtcttaaagaagatacgtcttttgggggcaacctcggacgagcagtcttccaggccaaaaagaggattcttgaacctctgggcctggttgaggaacctgttaagacggctccgggaaaaaagaggccggtagagcactctcctgcggagccagactcctcctcgggaaccggaaaagcgggccagcagcctgcaagaaagagattgaattttggtcagactggagacgcagactcagtacctgacccccagcctctcggacagccaccagcagccccctctggtctgggaactaatacgatggcttcaggcagtggcgcaccaatggcagacaataacgagggcgccgacggagtgggtaattcctcgggaaattggcattgcgattccacatggatgggcgacagagtcatcaccaccagcacccgcacctgggccctgcccacctacaacaaccatctgtacaagcaaatctccagccagtctggagccagcaacgacaaccactactttggctacagcaccccctgggggtattttgacttcaacagattccactgccacttctccccacgtgactggcaaagactcatcaacaacaactggggattccggcccaagagactcagcttcaagctctttaacattcaagtcaaagaggtcacgcagaatgacggtacgacgacgattgccaataaccttaccagcacggttcaggtgtttactgactcggagtaccagctcccgtacgtcctcggctcggcgcatcaaggatgcctcccgccgttcccagcagacgtcttcatggtgccacagtatggatacctcaccctgaacaacggcagtcaggcggtaggacgctcttccttttactgcctggagtactttccttctcagatgcttcgtaccggaaacaactttaccttcagctacacctttgaagacgttcctttccatagcagctacgctcacagccaaagtctggaccgtctcatgaatcctctcatcgaccagtacctgtattacttgagcagaacaaacactccaagcggaaccaccacgatgtccaggcttcagttttctcaggccggagcaagtgacattcgggaccagtctagaaactggcttcctggaccctgttaccgccagcagcgagtatcaaagacagctgcggacaacaacaacagtgattactcgtggactggagctaccaagtaccacctcaatggaagagactctctggtgaatccgggcccagctatggccagccacaaggacgatgaagaaaaatattttcctcagagcggggttctcatctttggaaaacaagactcgggaaaaactaatgtggacattgaaaaggttatgattacagacgaagaggaaatcaggaccaccaatcccgtggctacggagcagtatggttctgtatctaccaacctccagagcggcaacacacaagcagctacctcagatgtcaacacacaaggcgttcttccaggcatggtctggcaggacagagacgtgtacctgcaggggcccatctgggcaaagattccacacacggacggacattttcacccctctcccctcatgggcggattcggacttaaacaccctcctccacaaattctcatcaagaacaccccggtacctgcgaatccttcgaccactttcagtgcggcaaagtttgcttccttcatcacacagtactccacggggcaggtcagcgtggagatcgagtgggagctgcagaaggagaacagcaaacgctggaatcccgaaattcagtacacttccaactacaacaaatctgttaatgtggactttactgtggacactaatggtgtgtattcagagcctcgccccattggcaccagatacctgactcgtaatctgtaa

SEQ ID NO: 591 - protein, 735 aa, unidentified
  source 1..735: note = Adeno-associated virus
MAADGYLPDWLEDTLSEGIRQWWKLKPGPPPPKPAERHKDDSRGLVLPGYKYLGPFNGLDKGEPVNEADAAALEHDKAYDRQLDSGDNPYLKYNHADAEFQERLKEDTSFGGNLGRAVFQAKKRILEPLGLVEEPVKTAPGKKRPVEHSPAEPDSSSGTGKAGQQPARKRLNFGQTGDADSVPDPQPLGQPPAAPSGLGTNTMASGSGAPMADNNEGADGVGNSSGNWHCDSTWMGDRVITTSTRTWALPTYNNHLYKQISSQSGASNDNHYFGYSTPWGYFDFNRFHCHFSPRDWQRLINNNWGFRPKRLSFKLFNIQVKEVTQNDGTTTIANNLTSTVQVFTDSEYQLPYVLGSAHQGCLPPFPADVFMVPQYGYLTLNNGSQAVGRSSFYCLEYFPSQMLRTGNNFTFSYTFEDVPFHSSYAHSQSLDRLMNPLIDQYLYYLSRTNTPSGTTTMSRLQFSQAGASDIRDQSRNWLPGPCYRQQRVSKTAADNNNSDYSWTGATKYHLNGRDSLVNPGPAMASHKDDEEKYFPQSGVLIFGKQDSGKTNVDIEKVMITDEEEIRTTNPVATEQYGSVSTNLQSGNTQAATSDVNTQGVLPGMVWQDRDVYLQGPIWAKIPHTDGHFHPSPLMGGFGLKHPPPQILIKNTPVPANPSTTFSAAKFASFITQYSTGQVSVEIEWELQKENSKRWNPEIQYTSNYNKSVNVDFTVDTNGVYSEPRPIGTRYLTRNL

SEQ ID NO: 592 - DNA, 2208 bp, unidentified
  source 1..2208: mol_type = unassigned DNA; note = Adeno-associated virus
atggctgccgatggttatcttccagattggctcgaggacactctctctgaaggaataagacagtggtggaagctcaaacctggcccaccaccaccaaagcccgcagagcggcataaggacgacagcaggggtcttgtgcttcctgggtacaagtacctcggacccttcaacggactcgacaagggagagccggtcaacgaggcagacgccgcggccctcgagcacgacaaggcctacgaccggcagctcgacagcggagacaacccgtacctcaagtacaaccacgccgacgcggagtttcaggagcgtcttaaagaagatacgtcttttgggggcaacctcggacgagcagtcttccaggccaaaaagaggattcttgaacctctgggcctggttgaggaacctgttaagacggctccgggaaaaaagaggccggtagagcactctcctgcggagccagactcctcctcgggaaccggaaaagcgggccagcagcctgcaagaaagagattgaattttggtcagactggagacgcagactcagtacctgacccccagcctctcggacagccaccagcagccccctctggtctgggaactaatacgatggcttcaggcagtggcgcaccaatggcagacaataacgagggcgccgacggagtgggtaattcctcgggaaattggcattgcgattccacatggatgggcgacagagtcatcaccaccagcacccgcacctgggccctgcccacctacaacaaccatctgtacaagcaaatctccagccagtctggagccagcaacgacaaccactactttggctacagcaccccctgggggtatttcgacttcaacagattccactgccacttctccccacgtgactggcaaagactcatcaacaacaactggggattccggcccaagagactcagcttcaagctctttaacattcaagtcaaagaggtcacgcagaatgacggtacgacgacgattgccaataaccttaccagcacggttcaggtgtttactgactcggggtaccagctcccgtacgtcctcggctcggcgcatcaaggatgccttccgccgttcccagcagacgtcttcatggtgccacagtatggatacctcaccctgaacaacggcagtcaggcggtaggacgctcttccttttactgcctggagtactttccttctcagatgcttcgtaccggaaacaactttaccttcagctacacctttgaagacgttcctttccatagcagctacgctcacggccaaagtctggaccgtctcatgaatcctctcatcgaccagtacctgtattacttgagcagaacaaacactccaagcggaaccaccacgatgtccaggcttcagttttctcaggccggagcaagtgacgttcgggaccagtctagaaactggcttcctggaccctgttaccgccagcagcgagtatcaaagacagctgcggacaacaacaacagtgattactcgtggactggagctaccaagtaccacctcaatggaagagactctctggtgaatccgggcccagctatggccagccacaaggacgatgaagaaaaatattttcctcagagcggggttctcgtctttggaaaacaagactcgggaaaaactaatgtggacattgaaaaggttatgattacagacgaagaggaaatcaggaccaccaatcccgcggctacggagcagtatggttctgtatctaccaacctccagagcggcaacacacaagcagctacctcagatgtcaacacacaaggcgttcttccaggcatggtctggcaggacagagacgtgtacctgcaggggcccatctgggcaaagattccacacacggacggacattttcacccctctcccctcatgggcggattcggacttaaacaccctcctccacaaattctcatcaagaacaccccggtacctgcgaatccttcgaccactttcagtgcggcaaagtttgtttccttcatcacacagtactccacggggcaggtcagcgtggagatcgagtgggagctgcagaaggagaacagcaaacgctggaatcccgaaattcagtacacttccaactacaacaaatctgttaatgtggactttactgtggacactaatggtgtgtattcagagcctcgccccattggcaccagatacctgactcgtaatctgtaa

SEQ ID NO: 593 - protein, 735 aa, unidentified
  source 1..735: note = Adeno-associated virus
MAADGYLPDWLEDTLSEGIRQWWKLKPGPPPPKPAERHKDDSRGLVLPGYKYLGPFNGLDKGEPVNEADAAALEHDKAYDRQLDSGDNPYLKYNHADAEFQERLKEDTSFGGNLGRAVFQAKKRILEPLGLVEEPVKTAPGKKRPVEHSPAEPDSSSGTGKAGQQPARKRLNFGQTGDADSVPDPQPLGQPPAAPSGLGTNTMASGSGAPMADNNEGADGVGNSSGNWHCDSTWMGDRVITTSTRTWALPTYNNHLYKQISSQSGASNDNHYFGYSTPWGYFDFNRFHCHFSPRDWQRLINNNWGFRPKRLSFKLFNIQVKEVTQNDGTTTIANNLTSTVQVFTDSGYQLPYVLGSAHQGCLPPFPADVFMVPQYGYLTLNNGSQAVGRSSFYCLEYFPSQMLRTGNNFTFSYTFEDVPFHSSYAHGQSLDRLMNPLIDQYLYYLSRTNTPSGTTTMSRLQFSQAGASDVRDQSRNWLPGPCYRQQRVSKTAADNNNSDYSWTGATKYHLNGRDSLVNPGPAMASHKDDEEKYFPQSGVLVFGKQDSGKTNVDIEKVMITDEEEIRTTNPAATEQYGSVSTNLQSGNTQAATSDVNTQGVLPGMVWQDRDVYLQGPIWAKIPHTDGHFHPSPLMGGFGLKHPPPQILIKNTPVPANPSTTFSAAKFVSFITQYSTGQVSVEIEWELQKENSKRWNPEIQYTSNYNKSVNVDFTVDTNGVYSEPRPIGTRYLTRNL

SEQ ID NO: 594 - DNA, 2208 bp, unidentified
  source 1..2208: mol_type = unassigned DNA; note = Adeno-associated virus
atggctgccgatggttatcttccagattggctcgaggacactctctctgaaggaataagacagtggtggaaactcaaacctggcccaccaccaccaaagcccgcagagcggcataaggacgacagcaggggtcttgtgcttcctgggtacaagtacctcggacccttcaacggactcgacaagggagagccggtcaacgaggcagacgccgcggccctcgagcacgacaaggcctacgaccggcagctcgacagcggagacaacccgtacctcaagtacaaccacgccgacgcggagtttcaggagcgccttaaagaagatacgtcttttgggggcaacctcggacgagcagtcttccaggcaaaaaagagggttctggaacctctgagcctggttgaggagcctgttaagacggctccgggaaaaaagaggccggtagagcactctcccgcagagccagattcctcctccggaactggaaagtcgggcaaccagcctgcaagaaagagattgaatttcggtcagactggagactcagactccgtacctgacccccagcctctcggacagccaccagcagccccctctggtctgggaactaatacgatggctacaggcagtggcgcaccaatggcagacaataacgagggcgccgacggagtgggtaattcctcgggaaattggcattgcgattccacatggatgggcgacagagtcatcaccaccagcacccgaacctgggccctgcccacctacaacaaccatctgtacaagcaaatatccagccagtctggagccagcaacgacaatcactactttggctacagcaccccctgggggtattttgacttcaacagattccactgccacttttcaccacgtgactggcaaagactcatcaacaacaactggggattccgacccaagagactcaacttcaagctctttaacattcaagtcaaagaggtcacgcagaatgacggtacgacgacgattgccaataaccttaccagcacggttcaggtgtttactgactcggagtaccagctcccgtacgtcctcggctcggcgcatcaaggatgcctcccgccgttcccagcagacgtcttcatggtgccacagtatggatacctcaccctgaacaacgggagtcaggcagtaggacgctcttcattttactgcctagagtactttccttctcagatgctgcgtaccggaaacaactttaccttcagctacacctttgaggacgttcctttccacagcagctacgctcacagccagagtttggaccgtctcatgaatcctctcatcgaccagtacctgtattacttgagcagaacaaacactccaagcggaaccaccacgcagtccaggcttcagttttctcaggccggagcgagtgacattcaggaccagtctaggaactggcttcctggaccctgttaccgtcagcagcgagtatcaaagacatctgcggataacaacaacagtgaatactcgtggactggagctaccaagtaccacctcaatggcagagactctctggtgaatccgggcccggccatggccagccacaaagacgatgaagaaaagttttttcctcagagcggggttcttatctttgggaagcaaggctcagagaaaacaaatgtggatattgaaaaggtcatgattacagacgaagaggaaatcaggaccaccaatcccgtggctacggagcagtatggttctgtatctaccaacctccagagcggcaacacacaagcagctaccgcagatgtcaacacacaaggcgttcttccaggcatggtcgggcaagacagagacgtgtacctgcaggggcctacttgggcaaagattccacacacggacggacattttcacccctctcccctcatgggcggatttggacttaaacaccctcctccacagattctcatcaagaacaccccggtacctgcgaatccttcgaccaccttcagtgcggcaaagtttgcttccttcattacacagtactccacggggcaggtcagcgtggagatcgagtgggagctgcagaaggagaacagcaaacgctggaatcccgagatccagtacacttccaactacaacaagtctgttaatgtggactttactgtggacactaatggcgtgtattcagagcctcgccccattggcaccagatacctgactcgtaatctgtaa

SEQ ID NO: 595 - protein, 735 aa, unidentified
  source 1..735: note = Adeno-associated virus
MAADGYLPDWLEDTLSEGIRQWWKLKPGPPPPKPAERHKDDSRGLVLPGYKYLGPFNGLDKGEPVNEADAAALEHDKAYDRQLDSGDNPYLKYNHADAEFQERLKEDTSFGGNLGRAVFQAKKRVLEPLSLVEEPVKTAPGKKRPVEHSPAEPDSSSGTGKSGNQPARKRLNFGQTGDSDSVPDPQPLGQPPAAPSGLGTNTMATGSGAPMADNNEGADGVGNSSGNWHCDSTWMGDRVITTSTRTWALPTYNNHLYKQISSQSGASNDNHYFGYSTPWGYFDFNRFHCHFSPRDWQRLINNNWGFRPKRLNFKLFNIQVKEVTQNDGTTTIANNLTSTVQVFTDSEYQLPYVLGSAHQGCLPPFPADVFMVPQYGYLTLNNGSQAVGRSSFYCLEYFPSQMLRTGNNFTFSYTFEDVPFHSSYAHSQSLDRLMNPLIDQYLYYLSRTNTPSGTTTQSRLQFSQAGASDIQDQSRNWLPGPCYRQQRVSKTSADNNNSEYSWTGATKYHLNGRDSLVNPGPAMASHKDDEEKFFPQSGVLIFGKQGSEKTNVDIEKVMITDEEEIRTTNPVATEQYGSVSTNLQSGNTQAATADVNTQGVLPGMVGQDRDVYLQGPTWAKIPHTDGHFHPSPLMGGFGLKHPPPQILIKNTPVPANPSTTFSAAKFASFITQYSTGQVSVEIEWELQKENSKRWNPEIQYTSNYNKSVNVDFTVDTNGVYSEPRPIGTRYLTRNL

SEQ ID NO: 596 - DNA, 2208 bp, unidentified
  source 1..2208: mol_type = unassigned DNA; note = Adeno-associated virus
atggctgccgatggttatcttccagattggctcgaggacactctctctgaaggaataagacagtggtggaagctcaaacctggcccaccaccaccaaagcccgcagagcggcataaggacgacagcaggggtcttgtgcttcctgggtacaagtacctcggacccttcaacggactcgacaagggagagccggtcaacgaggcagacgccgcggccctcgagcacgacaaggcctacgaccggcagctcgacagcggagacaacccgtacctcaagtacaaccacgccgacgcagagtttcaggagcgccttaaagaagatacgtcttttgggggcaacctcggacgagcagtcttccaggcaaaaaagagggttctggaacctctgggcctggttgaggagcctgttaagacggctccgggaaaaaagaggccggtagagcactctcctgcagagccagattcctcctccggaactggaaagtcgggcaaccagcctgcaagaaagagattgaatttcggtcagactggagactcagactccgtacctgacccccagcctctcggacagccaccagcagccccctctggtctgggaactaatacgatggctacaggcagtggcgcaccaatggcagacaataacgagggcgccgacggagtgggtaattcctcgggaaattggcattgcgattccacatggatgggcgacagagtcatcaccaccagcacccgaacctgggccctgcccacctacaacaaccatctgtacaagcaaatatccagccagtctggagccagcaacgacaatcactactttggctacagcaccccctgggggtattttgacttcaacagattccactgccacttttcaccacgtgactggcaaagactcatcaacaacaactggggattccgacccaagagactcaacttcaagctctttaacattcaagtcaaagaggtcacgcagaatgacggtacgacgacgattgccaataaccttaccagcacggttcaggtgtttactgactcggagtaccagctcccgtacgtcctcggctcggcgcatcaaggatgcctcccgccgttcccagcagacgtcttcatggtgccacagtatggatacctcaccctgaacaacgggagtcaggcagtaggacgctcttcattttactgcctagggtactttccttctcagatgctgcgtaccggaaacaactttaccttcagctacacctttgaggacgttcctttccacagcagctacgctcacagccagagtttggaccgtctcatgaatcctctcatcgaccagtacctgtattacttgagcagaacaaacactccaagcggaaccaccacgcagtccaggcttcagttttctcaggccggagcgagtgacattcgggaccagtctaggaactggcttcctggaccctgttaccgtcagcagcgagtatcaaagacatctgcggataacaacaacagtgaatactcgtggactggagctaccaagtaccacctcaatggcagagactctctggtgaatccgggcccggccatggccagccacaaagacgatgaagaaaagttttttcctcagagcggggttcttatctttgggaagcaaggcccagagaaaacaaatgtggatattgaaaaggtcatgattacagacgaagaggaaatcaggaccaccaatcccgtggctacggagcagtatggttctgtatctaccaacctccagagcggcaacacacaagcagctaccgcagatgtcaacacacaaggcgttcttccaggcatggtctggcaagacagagacgtgtacctgcaggggcctatttgggcaaagattccacacacggacggacattttcacccctctcccctcatgggcggatttggacttaaacaccctcctccacagattctcatcaagaacaccccggtacctgcgaatccttcgaccaccttcagtgcggcaaagtttgcttccttcattacacagtactccacggggcaggtcagcgtggagatcgagtgggagctgcagaaggagaacagcaaacgctggaatcccgagatccagtacacttccaactacaacaagtctgttaatgtggactttactgtggacactaatggcgtgtattcagagcctcgccccattggcaccagatacctgactcgtaatctgtaa

SEQ ID NO: 597 - protein, 735 aa, unidentified
  source 1..735: note = Adeno-associated virus
MAADGYLPDWLEDTLSEGIRQWWKLKPGPPPPKPAERHKDDSRGLVLPGYKYLGPFNGLDKGEPVNEADAAALEHDKAYDRQLDSGDNPYLKYNHADAEFQERLKEDTSFGGNLGRAVFQAKKRVLEPLGLVEEPVKTAPGKKRPVEHSPAEPDSSSGTGKSGNQPARKRLNFGQTGDSDSVPDPQPLGQPPAAPSGLGTNTMATGSGAPMADNNEGADGVGNSSGNWHCDSTWMGDRVITTSTRTWALPTYNNHLYKQISSQSGASNDNHYFGYSTPWGYFDFNRFHCHFSPRDWQRLINNNWGFRPKRLNFKLFNIQVKEVTQNDGTTTIANNLTSTVQVFTDSEYQLPYVLGSAHQGCLPPFPADVFMVPQYGYLTLNNGSQAVGRSSFYCLGYFPSQMLRTGNNFTFSYTFEDVPFHSSYAHSQSLDRLMNPLIDQYLYYLSRTNTPSGTTTQSRLQFSQAGASDIRDQSRNWLPGPCYRQQRVSKTSADNNNSEYSWTGATKYHLNGRDSLVNPGPAMASHKDDEEKFFPQSGVLIFGKQGPEKTNVDIEKVMITDEEEIRTTNPVATEQYGSVSTNLQSGNTQAATADVNTQGVLPGMVWQDRDVYLQGPIWAKIPHTDGHFHPSPLMGGFGLKHPPPQILIKNTPVPANPSTTFSAAKFASFITQYSTGQVSVEIEWELQKENSKRWNPEIQYTSNYNKSVNVDFTVDTNGVYSEPRPIGTRYLTRNL

SEQ ID NO: 598 - protein, 735 aa, unidentified
  source 1..735: note = Adeno-associated virus
MAADGYLPDWLEDTLSEGIRQWWKLKPGPPPPKPAERHKDDSRGLVLPGYKYLGPFNGLDKGEPVNEADAAALEHDKAYDRQLDSGDNPYLKYNHADAEFQERLKEDTSFGGNLGRAVFQAKKRVLEPLGLVEEPVKTAPGKKRPVEHSPAEPDSSSGTGKSGNQPARKRLNFGQTGDSDSVPDPQPLGQPPAAPSGLGTNTMATGSGAPMADNNEGADGVGNSSGNWHCDSTWMGDRVITTSTRTWALPTYNNHLYKQISSQSGASNDNHYFGYSTPWGYFDFNRFHCHFSPRDWQRLINNNWGFRPKRLNFKLFNIQVKEVTQNDGTTTIANNLTSTVQVFTDSEYQLPYVLGSAHQGCLPPFPADVFMVPQYGYLTLNNGSQAVGRSSFYCLEYFPSQMLRTGNNFTFSYTFEDVPFHSSYAHSQSLDRLMNPLIDQYLYYLSRTNTPSGTTTQSRLQFSQAGASDIRDQSRNWLPGPCYRQQRVSKTSADNNNSEYSWTGATKYHLNGRDSLVNPGPAMASHKDDEEKFFPQSGVLIFGKQGPEKTNVDIEKVMITDEEEIRTTNPVATEQYGSVSTNLQSGNTQAATADVNTQGVLPGMVWQDRDVYLQGPIWAKIPHTDGHFHPSPLMGGFGLKHPPPQILIKNTPVPANPSTTFSAAKFASFITQYSTGQVSVEIEWELQKENSKRWNPEIQYTSNYNKSVNVDFTVDTNGVYSEPRPIGTRYLTRNL

SEQ ID NO: 599 - protein, 735 aa, unidentified; identical to SEQ ID NO: 598
  source 1..735: note = Adeno-associated virus

SEQ ID NO: 600 - DNA, 2211 bp, unidentified
  source 1..2211: mol_type = unassigned DNA; note = Adeno-associated virus
atggctgccgatggttatcttccagattggctcgaggacactctctctgaaggaataagacagtggtggaagctcaaacctggcccaccaccaccaaagcccgcagagcggcataaggacgacagcaggggtcttgtgcttcctgggtacaagtacctcggacccttcaacggactcgacaagggggagccggtcaacgaggcagacgccgcggccctcgagcacgacaaggcctacgaccggcagctcgacagcggagacaacccgtacctcaagtacaaccacgccgacgcagagtttcaggagcgccttaaagaagatacgtcttttgggggcaacctcggacgagcagtcttccaggcgaaaaagagggttcttgaacctctgcggcctggtttgaggaaacctgttaagacggctccgggaaaaaagaggccggtagagcactctcctgtggagccagactcctcctcgggaaccggaaaagcgggccagcagcctgcaagaaaaagattaaattttggtcagactggagacgcagactccgtacctgacccccagcctctcggacagccaccagcagccccctctggtctgggatctactacaatggctacaggcagtggcgcaccaatggcagacaataacgagggtgccgatggagtgggtaattcctcaggaaattggcattgcgattcccaatggctggacgacagagtcatcgccaccagcacccgaacctgggccctgcccacatacaacaaccacctctacaagcaaatctccagccaatcaggagcctgcaacgacaaccactactttggctacagcaccccctgggggtattttgacttcaacagattccactgccacttttcaccacgtgactggcaaagactcatcaacagcaactggggattccggcccaaaagactcaacttcaagctctttaatattcaagtcaaagaggtcacgcagaatgacggtacgacgacgattgccaataaccttaccagcacggttcaggtgtttactgactcggagtaccagctcccgtacgtcccgggctcggcgcatcaaggatgcctcccgccgtttccagcggacgtcttcatggtcccacagtatggatacctcaccctgaacaacgggagtcaggcggtaggacgctcttccttttactgcctggagtactttccttctcagatgctgcgtactggaaacaactttcagttcagctacacttttgaagacgtgcctttccacagcagctacgctcactgccagagtctggatcggctgatgaatcctctgatcgaccagtacctgtattatctgaacaagacacaaacaaatagtggaactcttcagcagtctcggctactgtttagccaagctggaccaaccaacatgtctcttcaagctaaaaactggctgcctggaccttgctacagacagcagcgtctgtcaaaacaggcaaacgacaataacaactgcaactttccctggactgcagctacaaagtatcatctaaatggccgggactcgttggttaatccaggaccagctatggccagtcacaaggatgacgaagaaaagtttttccccatgcatggaaccctgatatttggtaaacaaggaacaaatgccaacgacgcggatttggaaaatgtcatgattacagatgaagaagaaatcaggcccaccaatcccgtggctacggagcagtacgggactgtgtcaaataatttgcaaaactcaaacactggtccaactacaggaactgtcaatcaccaaggagcgttacctggtatggtgtggcaggatcgagacgtgtacctgcagggacccatttgggccaagattcctcacaccgatggacactttcatccttctccactgatgggaggttttggactcaaacacccgcctcctcagatcatgatcaaaagcactcccgttccagccaatcctcccacaaacttcagttctgccaagtttgcttcttccatcacacagtattccacgggacaggtcagcgtggagatcgagtgggagctgcagaaggagaacagcaaacgctggaatcccgaaattcagtacacttccaactacaacaagtctgttaatgtggactttactgtggacactaatggtgtgtattcagagcctcgccccattggcaccagatacctgactcgtaatctgtaa

SEQ ID NO: 601 - protein, 736 aa, unidentified
  source 1..736: note = Adeno-associated virus
MAADGYLPDWLEDTLSEGIRQWWKLKPGPPPPKPAERHKDDSRGLVLPGYKYLGPFNGLDKGEPVNEADAAALEHDKAYDRQLDSGDNPYLKYNHADAEFQERLKEDTSFGGNLGRAVFQAKKRVLEPLRPGLRKPVKTAPGKKRPVEHSPVEPDSSSGTGKAGQQPARKRLNFGQTGDADSVPDPQPLGQPPAAPSGLGSTTMATGSGAPMADNNEGADGVGNSSGNWHCDSQWLDDRVIATSTRTWALPTYNNHLYKQISSQSGACNDNHYFGYSTPWGYFDFNRFHCHFSPRDWQRLINSNWGFRPKRLNFKLFNIQVKEVTQNDGTTTIANNLTSTVQVFTDSEYQLPYVPGSAHQGCLPPFPADVFMVPQYGYLTLNNGSQAVGRSSFYCLEYFPSQMLRTGNNFQFSYTFEDVPFHSSYAHCQSLDRLMNPLIDQYLYYLNKTQTNSGTLQQSRLLFSQAGPTNMSLQAKNWLPGPCYRQQRLSKQANDNNNCNFPWTAATKYHLNGRDSLVNPGPAMASHKDDEEKFFPMHGTLIFGKQGTNANDADLENVMITDEEEIRPTNPVATEQYGTVSNNLQNSNTGPTTGTVNHQGALPGMVWQDRDVYLQGPIWAKIPHTDGHFHPSPLMGGFGLKHPPPQIMIKSTPVPANPPTNFSSAKFASSITQYSTGQVSVEIEWELQKENSKRWNPEIQYTSNYNKSVNVDFTVDTNGVYSEPRPIGTRYLTRNL

SEQ ID NO: 602 - DNA, 2208 bp, unidentified
  source 1..2208: mol_type = unassigned DNA; note = Adeno-associated virus
atggctgccgatggttatcttccagattggctcgaggacactctctctgaaggaataagacagtggtggaagctcaaacctggcccaccaccaccaaagcccgcagagcggcataaggacgacagcaggggtcttgtgcttcctgggtacaagtacctcggacccttcaacggactcgacaagggagagccggtcaacgaggcagacgccgcggccctcgagcacgacaaggcctacgaccggcagctcgacagcggagacaacccgtacctcaagtacaaccacgccgacgcggagtttcaggagcgccttaaagaggatacgtcttttgggggcaacctcggacgagcagtcttccaggcaaaaaagagggttctggaacctctgggcctggttgaggagcctgttaagacggctccgggaaaaaagaggccggtagagcactctcctgcagagccagattcctcctccggaactggaaagtcgggcaaccagcctgcaagaaagagattgaatttcggtcagactggagactcagactccgtacctgacccccagcctctcggacagccaccagcagccccctctggtctgggaactaatacgatggctacaggcagtggcgcaccaatggcagacaataacgagggcgccgacggagtgggtaattcctcgggaaattggcattgcgattccacatggatgggcgacagagtcatcaccaccagcacccgaacctgggccctgcccacctacaacaaccatctgtacaagcaaatatccagccagtctggagccagcaacgacaatcactactttggctacagcaccccctgggggtattttgacttcaacagattccactgccacttttcaccacgtgactggcaaagactcatcaacaacaactggggattccgacccaagagactcaacttcaagctctttaacattcaagtcaaagaggtcacgcagaatgacggtacgacgacgattgccaataaccttaccagcacggttcaggtgtttactgactcggagtaccagctcccgtacgtcctcggctcggcgcatcaaggatgcctcccgccgttcccagcagacgtcttcatggtgccacagtatggatacctcaccctgaacaacgggagtcaggcagtaggacgctcttcattttactgcctagagtactttccttctcagatgctgcgtaccggaaacagctttaccttcagctacacctttgaggacgttcctttccacagcagctacgctcacagccagagtttggaccgtctcatgaatcctctcatcgaccagtacctgtattacttgagcagaacaaacactccaagcggaaccaccacgcagtccaggcttcagttttctcaggccggagcgagtgacattcgggaccagtctaggaactggcttcctggaccctgttaccgtcagcagcgagtatcaaagacatctgcggataacaacaacagtgaatactcgtggactggagctaccaagtaccacctcaatggcagagactctctggtgaatccgggcccggccatggccagccacaaagacgatgaagaaaagttctttcctcagagcggggttcttatctttgggaagcaaggctcagagaaaacaaatgtggatattgaaaaggtcatgattacagacgaagaggaaatcaggaccaccaatcccgtggctacggagcagtatggttctgtatctaccaacctccagagcggcaacacacaagcagctaccgcagatgtcaacacacaaggcgttcttccaggcatggtctggcaagacagagacgtgtacctgcaggggcctatttgggcaaagattccacacacggacggacattttcacccctctcccctcatgggcggatttggacttaaacaccctcctccacagattctcatcaagaacaccccggtacctgcgaatccttcgaccaccttcagtgcggcaaagtttgcttccttcattacacagtactccacggggcaggtcagcgtggagatcgagtgggagctgcagaaggagaacagcaaacgctggaatcccgagatccagtacacttccaactacaacaagtctgttaatgtggactttactgtggacactaatggcgtgtattcagagcctcgccccattggcaccagatacctgactcgtaatctgtaa

SEQ ID NO: 603 - protein, 735 aa, unidentified
  source 1..735: note = Adeno-associated virus
MAADGYLPDWLEDTLSEGIRQWWKLKPGPPPPKPAERHKDDSRGLVLPGYKYLGPFNGLDKGEPVNEADAAALEHDKAYDRQLDSGDNPYLKYNHADAEFQERLKEDTSFGGNLGRAVFQAKKRVLEPLGLVEEPVKTAPGKKRPVEHSPAEPDSSSGTGKSGNQPARKRLNFGQTGDSDSVPDPQPLGQPPAAPSGLGTNTMATGSGAPMADNNEGADGVGNSSGNWHCDSTWMGDRVITTSTRTWALPTYNNHLYKQISSQSGASNDNHYFGYSTPWGYFDFNRFHCHFSPRDWQRLINNNWGFRPKRLNFKLFNIQVKEVTQNDGTTTIANNLTSTVQVFTDSEYQLPYVLGSAHQGCLPPFPADVFMVPQYGYLTLNNGSQAVGRSSFYCLEYFPSQMLRTGNSFTFSYTFEDVPFHSSYAHSQSLDRLMNPLIDQYLYYLSRTNTPSGTTTQSRLQFSQAGASDIRDQSRNWLPGPCYRQQRVSKTSADNNNSEYSWTGATKYHLNGRDSLVNPGPAMASHKDDEEKFFPQSGVLIFGKQGSEKTNVDIEKVMITDEEEIRTTNPVATEQYGSVSTNLQSGNTQAATADVNTQGVLPGMVWQDRDVYLQGPIWAKIPHTDGHFHPSPLMGGFGLKHPPPQILIKNTPVPANPSTTFSAAKFASFITQYSTGQVSVEIEWELQKENSKRWNPEIQYTSNYNKSVNVDFTVDTNGVYSEPRPIGTRYLTRNL

SEQ ID NO: 604 - DNA, 2211 bp, unidentified; identical to SEQ ID NO: 494
  source 1..2211: mol_type = unassigned DNA; note = Adeno-associated virus

SEQ ID NO: 605 - protein, 736 aa, unidentified
  source 1..736: note = Adeno-associated virus
MAADGYLPDWLEDTLSEGIRQWWKLKPGPPPPKPAERHKDDSRGLVLPGYKYLGPGNGLDKGEPVNAADAAALEHDKAYDQQLKAGDNPYLKYNHADAEFQERLKEDTSFGGNLGRAVFQAKKRLLEPLGLVEEAAKTAPGKKRPVEQSPQEPDSSAGIGKSGSQPAKKKLNFGQTGDTESVPDPQPIGEPPAAPSGVGSLTMASGGGAPVADNNEGADGVGSSSGNWHCDSQWLGDRVITTSTRTWALPTYNNHLYKQISNSTSGGSSNDNAYFGYSTPWGYFDFNRFHCHFSPRDWQRLINNNWGFRPKRLNFKLFNIQVKEVTDNNGVKTIANNLTSTVQVFTDSDYQLPYVLGSAHEGCLPPFPADVFMIPQYGYLTLNDGGQAVGRSSFYCLEYFPSQMLRTGNNFQFSYEFENVPFHSSYAHSQSLDRLMNPLIDQYLYYLSKTINGSGQNQQTLKFSVAGPSNMAVQGRNYIPGPSYRQQRVSTTVTQNNNSEFAWPGASSWALNGRNSLMNPGPAMASHKEGEDRFFPLSGSLIFGKQGTGRDNVDADKVMITNEEEIKTTNPVATESYGQVATNHQSAQAQAQTGWVQNQGILPGMVWQDRDVYLQGPIWAKIPHTDGNFHPSPLMGGFGMKHPPPQILIKNTPVPADPPTAFNKDKLNSFITQYSTGQVSVEIEWELQKENSKRWNPEIQYTSNYYKSNNVEFAVSTEGVYSEPRPIGTRYLTRNL

SEQ ID NO: 606 - DNA, 2211 bp, unidentified
  source 1..2211: mol_type = unassigned DNA; note = Adeno-associated virus
atggctgccgatggttatcttccagattggctcgaggacactctctctgaaggaataagacagtggtggaagctcaaacctggcccaccaccaccaaagcccgcagagcggcataaggacgacagcaggggtcttgtgcttcctgggtacaagtacctcggacccggcaacggactcgacaagggggagccggtcaacgcagcagacgcggcggccctcgagcacgacaaggcctacgaccagcagctcaaggccggagacaacccgtacctcaagtacaaccacgccgacgccgagttccaggagcggctcaaagaagatacgtcttttgggggcaacctcgggcgagcagtcttccaggccaaaaagaggcttcttgaacctcttggtctggttgaggaagcggctaagacggctcctggaaagaagaggcctgtagagcagtctcctcaggaaccggactcctccgcgggtattggcaaatcgggttcacagcccgctaaaaagaaactcaatttcggtcagactggcgacacagagtcagtccccgaccctcaaccaatcggagaacctcccgcagccccctcaggtgtgggatctcttacaatggcttcaggtggtggcgcaccagtggcagacaataacgaaggtgccgatggagtgggtagttcctcgggaaattggcattgcgattcccaatggctgggggacagagtcatcaccaccagcacccgaacctgggccctgcccacctacaacaatcacctctacaagcaaatctccaacagcacatctggaggatcttcaaatgacaacgcctacttcggctacagcaccccctgggggtattttgacttcaacagattccactgccacttctcaccacgtgactggcagcgactcatcaacaacaactggggattccggcctaagcgactcaacttcaagctcttcaacattcaggtcaaagaggttacggacaacaatggagtcaagaccatcgccaataaccttaccagcacggtccaggtcttcacggactcagactatcagctcccgtacgtgctcgggtcggctcacgagggctgcctcccgccgttcccagcggacgttttcatgattcctcagtacgggtatctgacgcttaatgatgggagccaggccgtgggtcgttcgtccttttactgcctggaatatttcccgtcgcaaatgctaagaacgggtaacaacttccagttcagctacgagtttgagaacgtacctttccatagcagctacgctcacagccaaagcctggaccgactaatgaatccactcatcgaccaatacttgtactatctctcaaagactattaacggttctggacagaatcaacaaacgctaaaattcagcgtggccggacccagcaacatggctgtccagggaagaaactacatacctggacccagctaccgacaacaacgtgtctcaaccactgtgactcaaaacaacaacagcgaatttgcttggcctggagcttcttcttgggctctcaatggacgtaatagcttgatgaatcctggacctgctatggccagccacaaagaaggagaggaccgtttctttcctttgtctggatctttaatttttggcaaacaaggaactggaagagacaacgtggatgcggacaaagtcatgataaccaacgaagaagaaattaaaactactaacccggtagcaacggagtcctatggacaagtggccacaaaccaccagagtgcccaagcacaggcgcagaccggctgggttcaaaaccaaggaatacttccgggtatggtttggcaggacagagatgtgtacctgcaaggacccatttgggccaaaattcctcacacggacggcaactttcacccttctccgctaatgggagggtttggaatgaagcacccgcctcctcagatcctcatcaaaaacacacctgtacctgcggatcctccaacggctttcaataaggacaagctgaactctttcatcacccagtattctactggccaagtcagcgtggagattgagtgggagctgcagaaggaaaacagcaagcgctggaacccggagatccagtacacttccaactattacaagtctaataatgttgaatttgctgttaatactgaaggtgtatatagtgaaccccgccccattggcaccagatacctgactcgtaatctgtaa

SEQ ID NO: 607 - protein, 736 aa, unidentified
  source 1..736: note = Adeno-associated virus
MAADGYLPDWLEDTLSEGIRQWWKLKPGPPPPKPAERHKDDSRGLVLPGYKYLGPGNGLDKGEPVNAADAAALEHDKAYDQQLKAGDNPYLKYNHADAEFQERLKEDTSFGGNLGRAVFQAKKRLLEPLGLVEEAAKTAPGKKRPVEQSPQEPDSSAGIGKSGSQPAKKKLNFGQTGDTESVPDPQPIGEPPAAPSGVGSLTMASGGGAPVADNNEGADGVGSSSGNWHCDSQWLGDRVITTSTRTWALPTYNNHLYKQISNSTSGGSSNDNAYFGYSTPWGYFDFNRFHCHFSPRDWQRLINNNWGFRPKRLNFKLFNIQVKEVTDNNGVKTIANNLTSTVQVFTDSDYQLPYVLGSAHEGCLPPFPADVFMIPQYGYLTLNDGSQAVGRSSFYCLEYFPSQMLRTGNNFQFSYEFENVPFHSSYAHSQSLDRLMNPLIDQYLYYLSKTINGSGQNQQTLKFSVAGPSNMAVQGRNYIPGPSYRQQRVSTTVTQNNNSEFAWPGASSWALNGRNSLMNPGPAMASHKEGEDRFFPLSGSLIFGKQGTGRDNVDADKVMITNEEEIKTTNPVATESYGQVATNHQSAQAQAQTGWVQNQGILPGMVWQDRDVYLQGPIWAKIPHTDGNFHPSPLMGGFGMKHPPPQILIKNTPVPADPPTAFNKDKLNSFITQYSTGQVSVEIEWELQKENSKRWNPEIQYTSNYYKSNNVEFAVNTEGVYSEPRPIGTRYLTRNL

SEQ ID NO: 608 - DNA, 2208 bp, unidentified
  source 1..2208: mol_type = unassigned DNA; note = Adeno-associated virus
atggctgccgatggttatcttccagattggctcgaggacactctctctgaaggaataagacagcggtggaagctcaaacctggcccaccaccaccagagcccgcagagcggcataaggacgacagcaggggtcttgtgcttcctgggtacaagtacctcggacccttcaacggactcgacaagggagagccggtcaacgaggcagacgccgcggccctcgagcacgacaaagcctacgaccggcagctcgacagcggagacaacccgtacctcaagtacaaccacgccgacgcggagtttcaggagcgccttaaagaagatacgtcttttgggggcaacctcggacgagcagtcttccaggcgaaaaagagggtacttgaacctctgggcctggttgaggaacctgttaagacggctccgggaaaaaagaggccggtagagcactctcctgtggagccagactcctcctcgggaaccggaaaggcgggccagcagcctgcaagaaaaagattgaattttggtcagactggagacgcagactcagtacctgacccccagcctctcggacagccaccagcagccccctctggtctgggaactaatacgatggctacaggcagtggcgcaccaatggcagacaataacgagggcgccgacggagtgggtaattcctcgggaaattggcattgcgattccacatggatgggcgacagagtcatcaccaccagcacccgaacctgggccctgcccacctacaacaaccacctctacaaacaaatttccagccaatcaggagcctcgaacgacaatcactactttggctacagcaccccttgggggtattttgacttcaacagattccactgccacttttcaccacgtgactggcaaagactcatcaacaacaactggggattccgacccaagagactcaacttcaagctctttaacattcaagtcaaagaggtcacgcagaatgacggtacgacgacgattgccaataaccttaccggcacggttcaggtgtttactgactcggagtaccagctcccgtacgtcctcggctcggcgcatcaaggatgcctcccgccgttcccagcagacgtcttcatggtgccacagtatggatacctcaccctgaacaacgggagtcaggcagtaggacgctcttcattttactgcctggagtactttccttctcagatgctgcgtaccggaaacaactttaccttcagctacacttttgaggacgttcctttccacagcagctacgctcacagccagagtctgggccgtctcatgaatcctctcatcgaccagtacctgtattacttgagcagaacaaacactccaagtggaaccaccacgcagtcaaggcttcagttttctcaggccggagcgagtgacattcgggaccagtctaggaactggcttcctggaccctgttaccgccagcagcgagtatcaaagacatctgcggataacaacaacagtgaatactcgtggactggagctaccaagtaccacctcaatggcagagactctctggtgaatccgggcccggccatggcaagccacaaggacgatgaagaaaagttttttcctcagagcggggttctcatctttgggaagcaaggctcagagaaaacaaatgtggacattgaaaaggtcatgattacagacgaagaggaaatcaggacaaccaatcccgtggctacggagcagtatggttctgtatctaccaacctccagagaggcaacagacaagcagctaccgcagatgtcaacacacaaggcgttcttccaggcatggtctggcaggacagagatgtgtaccttcaggggcccatctgggcaaagattccacacacggacggacattttcacccctctcccctcatgggtggattcggacttaaacaccctcctccacagattctcatcaagaacaccccggtacctgcgaatccttcgaccaccttcagtgcggcaaagtttgcttccttcatcacacagtactccacgggacaggtcagcgtggagatcgagtgggagctgcagaaggaaaacagcaaacgctggaatcccgaaattcagtacacttccaactacaacaagtctgttaatgtggactttactgtggacactaatggcgtgtattcagagcctcgccccattggcaccagatacctgactcgtaatctgtaa

SEQ ID NO: 609 - protein, 735 aa, unidentified
  source 1..735: note = Adeno-associated virus
MAADGYLPDWLEDTLSEGIRQRWKLKPGPPPPEPAERHKDDSRGLVLPGYKYLGPFNGLDKGEPVNEADAAALEHDKAYDRQLDSGDNPYLKYNHADAEFQERLKEDTSFGGNLGRAVFQAKKRVLEPLGLVEEPVKTAPGKKRPVEHSPVEPDSSSGTGKAGQQPARKRLNFGQTGDADSVPDPQPLGQPPAAPSGLGTNTMATGSGAPMADNNEGADGVGNSSGNWHCDSTWMGDRVITTSTRTWALPTYNNHLYKQISSQSGASNDNHYFGYSTPWGYFDFNRFHCHFSPRDWQRLINNNWGFRPKRLNFKLFNIQVKEVTQNDGTTTIANNLTGTVQVFTDSEYQLPYVLGSAHQGCLPPFPADVFMVPQYGYLTLNNGSQAVGRSSFYCLEYFPSQMLRTGNNFTFSYTFEDVPFHSSYAHSQSLGRLMNPLIDQYLYYLSRTNTPSGTTTQSRLQFSQAGASDIRDQSRNWLPGPCYRQQRVSKTSADNNNSEYSWTGATKYHLNGRDSLVNPGPAMASHKDDEEKFFPQSGVLIFGKQGSEKTNVDIEKVMITDEEEIRTTNPVATEQYGSVSTNLQRGNRQAATADVNTQGVLPGMVWQDRDVYLQGPIWAKIPHTDGHFHPSPLMGGFGLKHPPPQILIKNTPVPANPSTTFSAAKFASFITQYSTGQVSVEIEWELQKENSKRWNPEIQYTSNYNKSVNVDFTVDTNGVYSEPRPIGTRYLTRNL

SEQ ID NO: 610 - DNA, 2208 bp, unidentified
  source 1..2208: mol_type = unassigned DNA; note = Adeno-associated virus
atggctgccgatggttatcttccagattggctcgaggacactctctctgaaggaataagacagcggtggaagctcaaacctggcccaccaccaccagagcccgcagagcggcataaggacgacagcaggggtcttgtgcttcctgggtacaagtacctcggacccttcaacggactcgacaagggagagccggtcaacgaggcagacgccgcggccctcgagcacgacaaagcctacgaccggcagctcgacagcggagacaacccgtacctcaagtacaaccacgccgacgcggagtttcaggagcgccttaaagaagatacgtcctttgggggcaacctcggacgagcagtcttccaggcgaaaaagagggtacttgaacctctgggcctggttgaggaacctgttaagacggctccgggaaaaaagaggccggtagagcactctcctgtggagccagactcctcctcgggaaccggaaaggcgggccagcagcctgcaagaaaaagattgaattttggtcagactggagacgcagactcagtacctgacccccagcctctcggacagccaccagcagccccctctggtctgggaactaatacgatggctacaggcagtggcgcaccaatggcagacaataacgagggcgccgacggagtgggtaattcctcgggaaattggcattgcgattccacatggatgggcgacagagtcatcaccaccagcacccgaacctgggccctgcccacctacaacaaccacctctacaaacaaatttccagccaatcaggagcctcgaacgacaatcactactttggctacagcaccccttgggggtattttgacttcaacagattccactgccacttttcaccacgtgactggcaaagactcatcaacaacaactggggattccgacccaagagactcaacttcaagctctttaacattcaagtcaaagaggtcacgcagaatgacggtacgacgacgattgccaataaccttaccagcacggttcaggtgtttactgactcggagtaccagctcccgtacgtcctcggctcggcgcatcaaggatgcctcccgccgttcccagcagacgtcttcatggtgccacagtatggatacctcaccctgaacaacgagagtcaggcagtaggacgctcttcattttactgcctggagtactttccttctcagatgctgcgtaccggaaacaactttaccttcagctacacttttgaggacgttcctttccacagcagctacgctcacagccagagtctgggccgtctcatgaatcctctcatcgaccagtacctgtattacttgagcagaacaaacactccaagtggaaccaccacgcagtcaaggcttcagttttctcaggccggagcgagtgacattcgggaccagtctaggaactggcttcctggaccctgttaccgccagcagcgagtatcaaagacatctgcggataacaacaacagtgaatactcgtggactggagctaccaagtaccacctcaatggcagagactctctggtgaatccgggcccggccatggcaagccacaaggacgatgaagaaaagttttttcctcagagcggggttctcatctttgggaagcaaggctcagagaaaacaaatgtggacattgaaaaggtcatgattacagacgaagaggaaatcaggacaaccaatcccgtggctacggagcagtatggttctgtatctaccaacctccagagaggcaacagacaagcagctaccgcagatgtcaacacacaaggcgttcttccaggcatggtctggcaggacagagatgtgtaccttcaggggcccatctgggcaaagattccacacacggacggacattttcacccctctcccctcatgggtggattcggacttaaacaccctcctccacagattctcatcaagaacaccccggtacctgcgaatccttcgaccaccttcagtgcggcaaagtttgcttccttcatcacacagtactccacgggacaggtcagcgtggagatcgagtgggagctgcagaaggaaaacagcaaacgctggaatcccgaaattcagtacacttccaactacaacaagtctgttaatgtggactttactgtggacactaatggcgtgtattcagagcctcgccccattggcaccagatacctgactcgtaatctgtaa

SEQ ID NO: 611 - protein, 735 aa, unidentified
  source 1..735: note = Adeno-associated virus
MAADGYLPDWLEDTLSEGIRQRWKLKPGPPPPEPAERHKDDSRGLVLPGYKYLGPFNGLDKGEPVNEADAAALEHDKAYDRQLDSGDNPYLKYNHADAEFQERLKEDTSFGGNLGRAVFQAKKRVLEPLGLVEEPVKTAPGKKRPVEHSPVEPDSSSGTGKAGQQPARKRLNFGQTGDADSVPDPQPLGQPPAAPSGLGTNTMATGSGAPMADNNEGADGVGNSSGNWHCDSTWMGDRVITTSTRTWALPTYNNHLYKQISSQSGASNDNHYFGYSTPWGYFDFNRFHCHFSPRDWQRLINNNWGFRPKRLNFKLFNIQVKEVTQNDGTTTIANNLTSTVQVFTDSEYQLPYVLGSAHQGCLPPFPADVFMVPQYGYLTLNNESQAVGRSSFYCLEYFPSQMLRTGNNFTFSYTFEDVPFHSSYAHSQSLGRLMNPLIDQYLYYLSRTNTPSGTTTQSRLQFSQAGASDIRDQSRNWLPGPCYRQQRVSKTSADNNNSEYSWTGATKYHLNGRDSLVNPGPAMASHKDDEEKFFPQSGVLIFGKQGSEKTNVDIEKVMITDEEEIRTTNPVATEQYGSVSTNLQRGNRQAATADVNTQGVLPGMVWQDRDVYLQGPIWAKIPHTDGHFHPSPLMGGFGLKHPPPQILIKNTPVPANPSTTFSAAKFASFITQYSTGQVSVEIEWELQKENSKRWNPEIQYTSNYNKSVNVDFTVDTNGVYSEPRPIGTRYLTRNL

SEQ ID NO: 612 - DNA, 2208 bp, unidentified
  source 1..2208: mol_type = unassigned DNA; note = Adeno-associated virus
atggctgccgatggttatcttccagattggctcgaggacactctctctgaaggaataagacagcggtggaagctcaaacctggcccaccaccaccagagcccgcagagcggcataaggacgacagcaggggtcttgtgcttcctgggtacaagtacctcggacccttcaacggactcgacaagggagagccggtcaacgaggcagacgccgcggccctcgagcacgacaaagcctacgaccggcagctcgacagcggagacaacccgtacctcaagtacaaccacgccgacgcggagtttcaggagcgccttaaagaagatacgtcttttgggggcaacctcggacgagcagtcttccaggcgaaaaagagggtacttgaacctctgggcctggttgaggaacctgttaagacggctccgggaaaaaagaggccggtagagcactctcctgtggagccagactcctcctcgggaaccggaaaggcgggccagcagcctgcaagaaaaagattgaattttggtcagactggagacgcagactcagtacctgacccccagcctctcggacagccaccagcagccccctctggtctgggaactaatacgatggctacaggcagtggcgcaccaatggcagacaataacgagggcgccgacggagtgggtaattcctcgggaaattggcattgcgattccacatggatgggcgacagagtcatcaccaccagcacccgaacctgggccctgcccacctacaacaaccacctctacaaacaaatttccagccaatcaggagcctcgaacgacaatcactactttggctacagcaccccttgggggtattttgacttcaacagattccactgccacttttcaccacgtgactggcaaagactcatcaacaacaactggggattccgacccaagagactcaacttcaagctctttaacattcaagtcaaagaggtcacgcagaatgacggtacgacgacgattgccaataaccttaccagcacggttcaggtgtttactgactcggagtaccagctcccgtacgtcctcggctcggcgcatcaaggatgcctcccgccgttcccagcagacgtcttcatggtaccacagtatggatacctcaccctgaacaacgggagtcaggcagtaggacgctcttcattttactgcctggagtactttccttctcagatgctgcgtaccggaaacaactttaccttcagctacacttttgaggacgttcctttccacagcagctacgctcacagccagagtctgggccgtctcatgaatcctctcatcgaccagtacctgtattacttgagcagaacaaacactccaagtggaaccaccacgcagtcaaggcttcagttttctcaggccggagcgagtgacattcgggaccagtctaggaactggcttcctggaccctgttaccgccagcagcgagtatcaaagacatctgcggataacaacaacagtgaatactcgtggactggagctaccaagtaccacctcaatggcagagactctctggtgaatccgggcccggccatggcaagccacaaggacgatgaagaaaagttttttcctcagagcggggttctcatctttgggaagcaaggctcagagaaaacaaatgtggacattgaaaaggtcatgattacagacgaagaggaaatcaggacaaccaatcccgtggctacggagcagtatggttctgtatctaccaacctccagagaggcaacagacaagcagctaccgcagatgtcaacacacaaggcgttcttccaggcatggtctggcaggacagagatgtgtaccttcaggggcccatctgggcaaagattccacacacggacggacattttcacccctctcccctcatgggtggattcggacttaaacaccctcctccacagattctcatcaagaacaccccggtacctgcgaatccttcgaccaccttcagtgcggcaaagtttgcttccttcatcacacagtactccacgggacaggtcagcgtggagatcgagtgggagctgcagaaggaaaacagcaaacgctggaatcccgaaattcagtacacttccaactacaacaagtctgttaatgtggactttactgtggacactaatggcgtgtattcagagcctcgccccattggcaccagatacctgactcgtaatctgtaa

SEQ ID NO: 613 - protein, 735 aa, unidentified
  source 1..735: note = Adeno-associated virus
MAADGYLPDWLEDTLSEGIRQRWKLKPGPPPPEPAERHKDDSRGLVLPGYKYLGPFNGLDKGEPVNEADAAALEHDKAYDRQLDSGDNPYLKYNHADAEFQERLKEDTSFGGNLGRAVFQAKKRVLEPLGLVEEPVKTAPGKKRPVEHSPVEPDSSSGTGKAGQQPARKRLNFGQTGDADSVPDPQPLGQPPAAPSGLGTNTMATGSGAPMADNNEGADGVGNSSGNWHCDSTWMGDRVITTSTRTWALPTYNNHLYKQISSQSGASNDNHYFGYSTPWGYFDFNRFHCHFSPRDWQRLINNNWGFRPKRLNFKLFNIQVKEVTQNDGTTTIANNLTSTVQVFTDSEYQLPYVLGSAHQGCLPPFPADVFMVPQYGYLTLNNGSQAVGRSSFYCLEYFPSQMLRTGNNFTFSYTFEDVPFHSSYAHSQSLGRLMNPLIDQYLYYLSRTNTPSGTTTQSRLQFSQAGASDIRDQSRNWLPGPCYRQQRVSKTSADNNNSEYSWTGATKYHLNGRDSLVNPGPAMASHKDDEEKFFPQSGVLIFGKQGSEKTNVDIEKVMITDEEEIRTTNPVATEQYGSVSTNLQRGNRQAATADVNTQGVLPGMVWQDRDVYLQGPIWAKIPHTDGHFHPSPLMGGFGLKHPPPQILIKNTPVPANPSTTFSAAKFASFITQYSTGQVSVEIEWELQKENSKRWNPEIQYTSNYNKSVNVDFTVDTNGVYSEPRPIGTRYLTRNL

SEQ ID NO: 614 - DNA, 2208 bp, unidentified
  source 1..2208: mol_type = unassigned DNA; note = Adeno-associated virus
atggctgccgatggttatcttccagattggctcgaggacactctctctgaaggaataagacagcggtggaagctcaaacctggcccaccaccaccagagcccgcagagcggcataaggacgacagcaggggtcttgtgcttcctgggtacaagtacctcggacccttcaacggactcgacaagggagagccggtcaacgaggcagacgccgcggccctcgagcacgacaaagcctacgaccggcagctcgacagcggagacaacccgtacctcaagtacaaccacgccgacgcggagtttcaggagcgccttaaagaagatacgtcttttgggggcaacctcggacgagcagtcttccaggcgaaaaagagggtactcgaacctctgggcctggttgaggaacctgttaagacggctccgggaaaaaagaggccggtagagcactctcctgtggagccagactcctcctcgggaaccggaaaggcgggccagcagcctgcaagaaaaagattgaattttggtcagactggagacgcagactcagtacctgacccccagcctctcggacagccaccagcagccccctctggtctgggaactaatacgatggctacaggcagtggcgcaccaatggcagacaataacgagggcgccgacggagtgggtaattcctcgggaaattggcattgcgattccacatggatgggcgacagagtcatcaccaccagcacccgaacctgggccctgcccacctacaacaaccacctctacaaacaaatttccagccaatcaggagcctcgaacgacaatcactactttggctacagcaccccttgggggtattttgacttcaacagattccactgccacttttcaccacgtgactggcaaagactcatcaacaacaactggggattccgacccaagagactcaacttcaagctctttaacattcaagtcaaagaggtcacgcagaatgacggtacgacgacgattgccaataaccttaccagcacggttcaggtgtttactgactcggagtaccagctcccgtacgtcctcggctcggcgcatcaaggatgcctcccgccgttcccagcagacgtcttcatggtgccacagtatggatacctcaccctgaacaacgggagtcaggcagcaggacgctcttcattttactgcctggagtactttccttctcagatgctgcgtaccggaaacaactttaccttcagctacacttttgaggacgttcctttccacagcagctacgctcacagccagagtctgggccgtctcatgaatcctctcatcgaccagtacctgtattacttgagcagaacaaacactccaagtggaaccaccacgcagtcaaggcttcagttttctcaggccggagcgagtgacattcgggaccagtctaggaactggcttcctggaccctgttaccgccagcagcgagtatcaaagacatctgcggataacaacaacagtgaatactcgtggactggagctaccaagtaccacctcaatggcagagactctctggtgaatccgggcccggccatggcaagccacaaggacgatgaagaaaagttttttcctcagagcggggttctcatctttgggaagcaaggctcagagaaaacaaatgtggacattgaaaaggtcatgattacagacgaagaggaaatcaggacaaccaatcccgtggctacggagcagtatggttctgtatctaccaacctccagagaggcaacagacaagcagctaccgcagatgtcaacacacaaggcgttcttccaggcatggtctggcaggacagagatgtgtaccttcaggggcccatctgggcaaagattccacacacggacggacattttcacccctctcccctcatgggtggattcggacttaaacaccctcctccacagattctcatcaagaacaccccggtacctgcgaatccttcgaccaccttcagtgcggcaaagtttgcttccttcatcacacagtactccacgggacaggtcagcgtggagatcgagtgggagctgcagaaggaaaacagcaaacgctggaatcccgaaattcagtacacttccaactacaacaagtccgttaatgtggactttactgtggacactaatggcgtgtattcagagcctcgccccattggcaccagatacctgactcgtaatctgtaa

SEQ ID NO: 615 - protein, 735 aa, unidentified
  source 1..735: note = Adeno-associated virus
MAADGYLPDWLEDTLSEGIRQRWKLKPGPPPPEPAERHKDDSRGLVLPGYKYLGPFNGLDKGEPVNEADAAALEHDKAYDRQLDSGDNPYLKYNHADAEFQERLKEDTSFGGNLGRAVFQAKKRVLEPLGLVEEPVKTAPGKKRPVEHSPVEPDSSSGTGKAGQQPARKRLNFGQTGDADSVPDPQPLGQPPAAPSGLGTNTMATGSGAPMADNNEGADGVGNSSGNWHCDSTWMGDRVITTSTRTWALPTYNNHLYKQISSQSGASNDNHYFGYSTPWGYFDFNRFHCHFSPRDWQRLINNNWGFRPKRLNFKLFNIQVKEVTQNDGTTTIANNLTSTVQVFTDSEYQLPYVLGSAHQGCLPPFPADVFMVPQYGYLTLNNGSQAAGRSSFYCLEYFPSQMLRTGNNFTFSYTFEDVPFHSSYAHSQSLGRLMNPLIDQYLYYLSRTNTPSGTTTQSRLQFSQAGASDIRDQSRNWLPGPCYRQQRVSKTSADNNNSEYSWTGATKYHLNGRDSLVNPGPAMASHKDDEEKFFPQSGVLIFGKQGSEKTNVDIEKVMITDEEEIRTTNPVATEQYGSVSTNLQRGNRQAATADVNTQGVLPGMVWQDRDVYLQGPIWAKIPHTDGHFHPSPLMGGFGLKHPPPQILIKNTPVPANPSTTFSAAKFASFITQYSTGQVSVEIEWELQKENSKRWNPEIQYTSNYNKSVNVDFTVDTNGVYSEPRPIGTRYLTRNL

SEQ ID NO: 616 - protein, 738 aa, unidentified; identical to SEQ ID NO: 458
  source 1..738: note = Adeno-associated virus

SEQ ID NO: 617 - DNA, 2217 bp, unidentified
  source 1..2217: mol_type = unassigned DNA; note = Adeno-associated virus
atggctgctgacggttatcttccagattggctcgaggacaacctctctgagggcattcgcgagtggtgggacctgaaacctggagcccccaagcccaaggccaaccagcagaagcaggacgacggccggggtctggtgcttcctggctacaagtacctcggacccttcaacggactcgacaagggggagcccgtcaacgcggcggacgcagcggccctcgagcacgacaaggcctacgaccagcagctcaaagcgggtgacaatccgtacctgcggtataaccacgccgacgccgagtttcaggagcgtctgcaagaagatacgtcttttgggggcaacctcgggcgagcagtcttccaggccaagaagcgggttctcgaacctctcggtctggttgaggaagctgctaagacggctcctggaaagaagagaccggtagaaccgtcacctcagcgttcccccgactcctccacgggcatcggcaagaaaggccagcagcccgctaaaaagagactgaactttggtcagactggcgactcagagtcagtccccgaccctcaaccaatcggagaaccaccagcaggcccctctggtctgggatctggtacaatggctgcaggcggtggcgctccaatggcagacaataacgaaggcgccgacggagtgggtagttcctcaggaaattggcattgcgattccacatggctgggcgacagagtcatcaccaccagcacccgaacctgggccctgcccacctacaacaaccacctctacaagcaaatatccaatgggacatcgggaggaagcaccaacgacaacacctacttcggctacagcaccccctgggggtattttgacttcaacagattccactgccacttctcaccacgtgactggcagcgactcatcaacaacaactggggattccggccaaaaagactcagcttcaagctcttcaacatccaggtcaaggaggtcacgcagaatgaaggcaccaagaccatcgccaataaccttaccagcacgattcaggtatttacggactcggaataccagctgccgtacgtcctcggctccgcgcaccagggctgcctgcctccgttcccggcggacgtcttcatgattccccagtacggctaccttacactgaacaatggaagtcaagccgtaggccgttcctccttctactgcctggaatattttccatctcaaatgctgcgaactggaaacaattttgaattcagctacaccttcgaggacgtgcctttccacagcagctacgcacacagccagagcttggaccgactgatgaatcctctcatcgaccagtacctgtactacttatccagaactcagtccacaggaggaactcaaggtacccagcaattgttattttctcaagctgggcctgcaaacatgtcggctcaggctaagaactggctacctggaccttgctaccggcagcagcgagtctctacgacactgtcgcaaaacaacaacagcaactttgcttggactggtgccaccaaatatcacctgaacggaagagactctttggtaaatcccggtgtcgccatggcaacccacaaggacgacgaggaacgcttcttcccgtcgagtggagtcctgatgttcggaaaacagggtgctggaagagacaatgtggactacagcagcgttatgctaaccagcgaagaagaaattaaaaccactaaccccgtagccacagaacaatacggtgtggtggctgacaacttgcagcaaaccaatacagggcctattgtgggaaatgtcaacagccaaggagccttacctggcatggtctggcagaaccgagacgtgtacctgcagggtcccatctgggccaagattcctcacacggacggcaacttccacccttcaccgctaatgggaggatttggactgaagcacccacctcctcagatcctgatcaagaacacgccggtacctgcggatcctccaacaacgttcagccaggcgaaattggcttccttcattacgcagtacagcaccggacaggtcagcgtggaaatcgagtgggagctgcagaaggagaacagcaaacgctggaacccagagattcagtacacttcaaactactacaaatctacaaatgtggactttgctgtcaatacagagggaacttattctgagcctcgccccattggtactcgttacctcacccgtaatctgtaa

SEQ ID NO: 618 - protein, 738 aa, unidentified
  source 1..738: note = Adeno-associated virus
MAADGYLPDWLEDNLSEGIREWWDLKPGAPKPKANQQKQDDGRGLVLPGYKYLGPFNGLDKGEPVNAADAAALEHDKAYDQQLKAGDNPYLRYNHADAEFQERLQEDTSFGGNLGRAVFQAKKRVLEPLGLVEEAAKTAPGKKRPVEPSPQRSPDSSTGIGKKGQQPAKKRLNFGQTGDSESVPDPQPIGEPPAGPSGLGSGTMAAGGGAPMADNNEGADGVGSSSGNWHCDSTWLGDRVITTSTRTWALPTYNNHLYKQISNGTSGGSTNDNTYFGYSTPWGYFDFNRFHCHFSPRDWQRLINNNWGFRPKRLSFKLFNIQVKEVTQNEGTKTIANNLTSTIQVFTDSEYQLPYVLGSAHQGCLPPFPADVFMIPQYGYLTLNNGSQAVGRSSFYCLEYFPSQMLRTGNNFEFSYTFEDVPFHSSYAHSQSLDRLMNPLIDQYLYYLSRTQSTGGTQGTQQLLFSQAGPANMSAQAKNWLPGPCYRQQRVSTTLSQNNNSNFAWTGATKYHLNGRDSLVNPGVAMATHKDDEERFFPSSGVLMFGKQGAGRDNVDYSSVMLTSEEEIKTTNPVATEQYGVVADNLQQTNTGPIVGNVNSQGALPGMVWQNRDVYLQGPIWAKIPHTDGNCHPSPLMGGFGLKHPPPQILIKNTPVPADPPTTFSQAKLASFITQYSTGQVSVEIEWELQKENSKRWNPEIQYTSNYYKSTNVDFAVNTEGTYSEPRPIGTRYLTRNL

SEQ ID NO: 619 - protein, 738 aa, unidentified
  source 1..738: note = Adeno-associated virus
MAADGYLPDWLEDNLSEGIREWWDLKPGAPKPKANQQKQDDGRGLVLPGYKYLGPFNGLDKGEPVNAADAAALEHDKAYDQQLKAGDNPYLRYNHADAEFQERLQEDTSFGGNLGRAVFQAKKRVLEPLGLVEEGAKTAPGKKRPVEPSPQRSPDSSTGIGKKGQQPARKRLNFGRTGDSESVPDPQPIGEPPAAPSSVGSGTMAAGGGAPMADNNEGADGVGSSSGNWHCDSTWLGDRVITTSTRTWALPTYNNHLYKQISNGTSGGSTNDNTYFGYSTPWGYLDFNRFHCHFSPRDWQRLINNNWGFRPKRLSFKLFNIQVKEVTQNEGTKTIANNLASTIQVFTDSEYQPPYVLGSAHQGCLPPFPADVFMIPQYGYLTLNNGSQAVGRSSFYCLEYFPSQMLRTGNNFSFSYTFEDVPFHSSYAHSQSLDRLMNPLIDQYLYYLSRTQSTGGTAGTQQLLFSRAGPSNMSAQARNWLPGPCYRQQRVSTTLSQNNNSNFAWTGATKYHLNGRDSLVNPGVAMATNKDDEDRFFPSSGILMFGKQGAGKDNVDYSNVMLTSEEEIKTTNPVATEQYGVVADNLQQQNTAPTVGAVNSQGALPGMVWQNRDVYLQGPIWAKIPHTDGNFHPSPLMGGFGLKHPPPQILIKNTPVPADPPTAFNQAKLNSFIAQYSTGQVSVEIEWELQKENSKRWNPEIQYTSNYYKSTNADFAVNTEGVYSEPRPIGTRYLTRNL

SEQ ID NO: 620 - DNA, 2217 bp, unidentified
  source 1..2217: mol_type = unassigned DNA; note = Adeno-associated virus
atggctgccgatggttatcttccagattggctcgaggacaacctctctgagggcattcgcgagtggtgggacctgaaacctggagccccgaaacccaaagccaaccagcaaaagcaggacgacggccggggtctggtgcttcctggctacaagtacctcggacccttcaacggactcgacaagggggagcccgtcaacgcggcggacgcagcggccctcgagcacgacaaggcctacgaccagcagctcaaagcgggtgacaatccgtacctgcggtataatcacgccgacgccgagtttcaggagcgtctgcaagaagatacgtcttttgggggcaacctcgggcgagcagtcttccaggccaagaagcgggttctcgaacctctcggtctggttgaggaaggcgctaagacggctcctggaaagaagagaccggtagagccgtcaccacagcgttcccccgactcctccacgggcatcggcaagaaaggccagcagcccgccagaaagagactcaatttcggtcggactggcgactcagagtcagtccccgaccctcaacctatcggagaacctccagcagcgccctctagtgtgggatctggtacaatggctgcaggcggtggcgcaccaatggcagacaataacgaaggtgccgacggagtgggtagttcctcgggaaattggcattgcgattccacatggctgggcgacagagttatcaccaccagcacccgaacctgggccctgcccacctacaacaaccacctctacaagcaaatctccaacgggacctcgggaggcagcaccaacgacaacacctactttggctacagcaccccctgggggtatcttgactttaacagattccactgccacttctcaccacgtgactggcagcgactcatcaacaacaactggggattccggcccaagagactcagcttcaagctcttcaacatccaggtcaaagaggtcacgcagaatgaaggcaccaagaccatcgccaataacctcgccagcaccatccaggtgtttacggactcggaataccagccgccgtacgtcctcggctctgcccaccagggctgcctgcctccgttcccggcggacgtcttcatgattcctcagtacggctacctgactctcaacaacggtagtcaggccgtgggacgttcctccttctactgcctggagtacttcccctctcagatgctgagaacgggcaacaacttttccttcagctacactttcgaggacgtgcctttccacagcagctacgcgcacagccagagtttggacaggctgatgaatcctctcatcgaccagtacctgtactacctgtcaagaacccagtctacgggaggcacagcgggaacccagcagttgctgttttctcgggccgggcctagcaacatgtcggctcaggccagaaactggctgcctggaccctgctacagacagcagcgcgtctccacgacactgtcgcaaaacaacaacagcaactttgcctggactggtgccaccaagtatcatctgaacggcagagactctctggtgaatccgggcgtcgccatggcaaccaacaaggacgacgaggaccgcttcttcccatccagcggcatcctcatgtttggcaagcagggagctggaaaagacaacgtggactatagcaacgtgatgctaaccagcgaggaagaaatcaagaccaccaaccccgtggccacagaacagtatggcgtggtggctgataacctacagcagcaaaacaccgctcctactgtgggggccgtcaacagccagggagccttacctggcatggtctggcagaaccgggacgtgtacctgcagggtcctatttgggccaagattcctcacacagatggcaactttcacccgtctcctttaatgggcggctttggacttaaacatccgcctcctcagatcctcatcaaaaacactcctgttcctgcggatcctccaacagcgttcaaccaggccaagctgaattctttcatcgcgcagtacagcaccggacaagtcagcgtggagatcgagtgggagctgcagaaggagaacagcaagcgctggaacccagagattcagtatacttccaactactacaaatctacaaatgcggactttgctgttaatactgagggtgtttactctgagcctcgccccattggcactcgttacctcacccgtaatctgtaa

SEQ ID NO: 621 - DNA, 2208 bp, unidentified
  source 1..2208: mol_type = unassigned DNA; note = Adeno-associated virus
atggctgccgatggttatcttccagattggctcgaggacactctctctgaaggaataagacagtggtggaagctcaaacctggcccaccaccaccaaagcccgcagagcggcataaggacgacagcaggggtcttgtgcttcctgggtacaagtacctcggacccttcaacggactcgacaagggggagccggtcaacgaggcagacgccgcggccctcgagcacgacaaggcctacgaccggcagctcgacagcggagacaacccgtacctcaagtacaaccacgccgacgcagagtttcaggagcgccttaaagaagatacgtcttttgggggcaacctcggacgagcagtcttccaggcgaaaaagagggttcttgaacctctgggcctggttgaggagcctgttaagacggctccgggaaaaaagaggccggtagagcactctcctgtggagccagactcctcctcgggaaccggaaaagcgggccagcagcctgcaagaaaaagattaaattttggtcagactggagacgcagactccgtacctgacccccagcctctcggacagccaccagcagccccctctggtctgggatctactacaatggctacaggcagtggcgcaccaatggcagacaataacgagggtgccgatggagtgggtaattcctcaggaaattggcattgcgattcccaatggctgggcgacagagtcatcaccaccagcacccgaacctgggccctgcccacatacaacaaccacctctacaagcaaatctccagccaatcaggagccagcaacgacaaccactactttggctacagcaccccctgggggtattttgacttcaacagattccactgccacttttcaccacgtgactggcaaagactcgtcaacaacaaccggggattccggcccaaaagactcaacttcaagctctttaatattcaagtcaaagaggtcacgcagaatgacggtacgacgacgattgccaataaccttaccagcacggttcaggtgtttactgactcggagtaccagctcccgtacgtcctgggctcggcgcatcaaggatgcctcccgccgtttccagcggacgtcttcatggtcccacagtatggatacctcaccctgaacaacgggagtcaggcggtaggacgctcttccttttactgcctggagtactttccttctcagatgctgcgtactggaaacaactttcagttcagctacacttttgaagacgtgcctttccacagcagctacgctcacagccagagtctggatcggctgatgaatcctctgatcgaccagtacctgtattatctgaacaagacacaaacaaatagtggaactcttcagcagtctcggctactgtttagccaagctggaccaaccaacatgtctcttcaagctaaaaactggctgcctggaccttgctacagacagcagcgtctgtcaaaacaggcaaacgacaacaacaacagcaactttccctggactgcagctacaaagtatcatctaaatggccgggactcgttggttaatccaggaccagctatggccagtcacaaggatgacgaagaaaagtttttccccatgcatggaaccctgatatttggtaaacaaggaacaaatgccaacgacgcggatttggaaaatgtcatgattacagatgaagaagaaatcagggccaccaatcccgtggctacggagcagtacgggactgtgtcaaataatttgcaaaactcaaacactggtccaactactggaactgtcaatcaccaaggagcgttacctggtatggtgtggcaggatcgagacgtgtacctgcagggacccatttgggccaagattcctcacaccgatggacactttcatccttctccactgatgggaggttttggactcaaacacccgcctcctcagatcatgatcaaaaacactcccgttccagccaatcctcccacaaacttcagttctgccaagtttgcttctttcatcacacagtattccacgggacaggtcagcgtggagatcgagtgggagctgcagaaggagaacagcaaacgctggaatcccgaaattcagtacacttccaactacaacaagtctgttaatgtggactttactgtggacactaatggtgtgtattcagagcctcgccccattggcaccagatacctgactcgtaatctgtaa

SEQ ID NO: 622 - protein, 735 aa, unidentified
  source 1..735: note = Adeno-associated virus
MAADGYLPDWLEDTLSEGIRQWWKLKPGPPPPKPAERHKDDSRGLVLPGYKYLGPFNGLDKGEPVNEADAAALEHDKAYDRQLDSGDNPYLKYNHADAEFQERLKEDTSFGGNLGRAVFQAKKRVLEPLGLVEEPVKTAPGKKRPVEHSPVEPDSSSGTGKAGQQPARKRLNFGQTGDADSVPDPQPLGQPPAAPSGLGSTTMATGSGAPMADNNEGADGVGNSSGNWHCDSQWLGDRVITTSTRTWALPTYNNHLYKQISSQSGASNDNHYFGYSTPWGYFDFNRFHCHFSPRDWQRLVNNNRGFRPKRLNFKLFNIQVKEVTQNDGTTTIANNLTSTVQVFTDSEYQLPYVLGSAHQGCLPPFPADVFMVPQYGYLTLNNGSQAVGRSSFYCLEYFPSQMLRTGNNFQFSYTFEDVPFHSSYAHSQSLDRLMNPLIDQYLYYLNKTQTNSGTLQQSRLLFSQAGPTNMSLQAKNWLPGPCYRQQRLSKQANDNNNSNFPWTAATKYHLNGRDSLVNPGPAMASHKDDEEKFFPMHGTLIFGKQGTNANDADLENVMITDEEEIRATNPVATEQYGTVSNNLQNSNTGPTTGTVNHQGALPGMVWQDRDVYLQGPIWAKIPHTDGHFHPSPLMGGFGLKHPPPQIMIKNTPVPANPPTNFSSAKFASFITQYSTGQVSVEIEWELQKENSKRWNPEIQYTSNYNKSVNVDFTVDTNGVYSEPRPIGTRYLTRNL

SEQ ID NO: 623 - protein, 738 aa, unidentified
  source 1..738: note = Adeno-associated virus
MAADGYLPDWLEDNLSEGIREWWDLKPGAPKPKANQQKQDDGRGLVLPGYKYLGPFNGLDKGEPVNAADAAALEHDKAYDQQLKAGDNPYLRYNHADAEFQERLQEDTSFGGNLGRAVFQAKKRVLEPLGLVEEAAKTAPGKKRPVEPSPQRSPDSSTGIGKKGQQPAKKRLSFGQTGDSESVPDPQPIGEPPAGPSGLGSGTMAAGGGAPMADNNEGADGVGSSSGNWHCDSTWLGDRVITTSTRTWALPTYNNHLYKQISNGTSGGSTNDNTYFGYSTPWGYFDFNRFHCHFSPRDWQRLINNNWGFRPKRLSFKLFNIQVKEVTQNEGTKTIANNLTSTIQVFTDSEYQLPYVLGSAHQGCLPPFPADVFMIPQYGYLTLNNGSQAVGRSSFYCLEYFPSQMLRTGNNSEFSYTFEDVPFHSSYAHSQSLDRLMNPLIDQYLYYLSRTQSTGGTQGTQQLLFSQAGPANMSAQAKNWLPGPCYRQQRVSTTLSQNNNSNFAWTGATKYHLNGRDSLVNPGVAMATHKDDEERFFPSSGVLMFGKQGAGRDNVDYSSVMLTSEEEIKTTNPVATEQYGVVADNLQQTNTGPIVGNVNSQGALPGMVWQNRDVYLQGPIWAKIPHTDGNFHPSPLMGGFGLKHPPPQILIKNTPVPADPPTTFSQAKLASFITQYSTGQVSVEIEWELQKENSKRWNPEIQYTSNYYKSTNVDFAVNTEGTYSEPRPIGTRYLTRNL

SEQ ID NO: 624 - DNA, 2217 bp, unidentified
  source 1..2217: mol_type = unassigned DNA; note = Adeno-associated virus
atggctgctgacggttatcttccagattggctcgaggacaacctctctgagggcattcgcgagtggtgggacctgaaacctggagcccccaagcccaaggccaaccagcagaagcaggacgacggccggggtctggtgcttcctggctacaagtacctcggacccttcaacggactcgacaagggggagcccgtcaacgcggcggacgcagcggccctcgagcacgacaaggcctacgaccagcagctcaaagcgggtgacaatccgtacctgcggtataaccacgccgacgccgagtttcaggagcgtctgcaagaagatacgtcttttgggggcaacctcgggcgagcagtcttccaggccaagaagcgggttctcgaacctctcggtctggttgaggaagctgctaagacggctcctggaaagaagagaccggtagaaccgtcacctcagcgttcccccgactcctccacgggcatcggcaagaaaggccagcagcccgctaaaaagagactgagctttggtcagactggcgactcagagtcagtccccgaccctcaaccaatcggagaaccaccagcaggcccctctggtctgggatctggtacaatggctgcaggcggtggcgctccaatggcagacaataacgaaggcgccgacggagtgggtagttcctcaggaaattggcattgcgattccacatggctgggcgacagagtcatcaccaccagcacccgaacctgggccctgcccacctacaacaaccacctctacaagcaaatatccaatgggacatcgggaggaagcaccaacgacaacacctacttcggctacagcaccccctgggggtattttgacttcaacagattccactgccacttctcaccacgtgactggcagcgactcatcaacaacaactggggattccggccaaaaagactcagcttcaagctcttcaacatccaggtcaaggaggtcacgcagaatgaaggcaccaagaccatcgccaataaccttaccagcacgattcaggtatttacggactcggaataccagctgccgtacgtcctcggctccgcgcaccagggctgcctgcctccgttcccggcggacgtcttcatgattccccagtacggctaccttacactgaacaatggaagtcaagccgtaggccgttcctccttctactgcctggaatattttccatctcaaatgctgcgaactggaaacaattctgaattcagctacaccttcgaggacgtgcctttccacagcagctacgcacacagccagagcttggaccgactgatgaatcctctcatcgaccagtacctgtactacttatccagaactcagtccacaggaggaactcaaggtacccagcaattgttattttctcaagctgggcctgcaaacatgtcggctcaggctaagaactggctacctggaccttgctaccggcagcagcgagtctctacgacactgtcgcaaaacaacaacagcaactttgcttggactggtgccaccaaatatcacctgaacggaagagactctttggtaaatcccggtgtcgccatggcaacccacaaggacgacgaggaacgcttcttcccgtcgagtggagtcctgatgtttggaaaacagggtgctggaagagacaatgtggactacagcagcgttatgctaaccagcgaagaagaaattaaaaccactaaccctgtagccacagaacaatacggtgtggtggctgacaacttgcagcaaaccaatacagggcctattgtgggaaatgtcaacagccaaggagccttacctggcatggtctggcagaaccgagacgtgtacctgcagggtcccatctgggccaagattcctcacacggacggcaacttccacccttcaccgctaatgggaggatttggactgaagcacccacctcctcagatcctgatcaagaacacgccggtacctgcggatcctccaacaacgttcagccaggcgaaattggcttccttcattacgcagtacagcaccggacaggtcagcgtggaaatcgagtgggagctgcagaaggagaacagcaaacgctggaacccagagattcagtacacttcaaactactacaaatctacaaatgtggactttgctgtcaatacagagggaacttattctgagcctcgccccattggtactcgttacctcacccgtaatctgtaa

SEQ ID NO: 625 - protein, 738 aa, unidentified
  source 1..738: note = Adeno-associated virus
MAADGYLPDWLEDNLSEGIREWWDLKPGAPKPKANQQKQDDGRGLVLPGYKYLGPFNGLDKGEPVNAADAAALEHDKAYDQQLKAGDNPYLRYNHADAEFQERLQEDTSFGGNLGRAVFQAKKRVLEPLGPVEEAAKTAPGKKRPVEPPPQRSPDSSTGIGKKGQQPAKKRLNFGQTGDSESVPDPQPIGEPPAGPSGLGSGTMAAGGGAPMADNNEGADGVGSSSGNWHCDSTWLGDRVITTSTRTWALPTYNNHLYKQISNGTSGGSTNDNTYFGYSTPWGYFDFNRFHCHFSPRDWQRLINNNWGFRPKRLSFKLFNIQVKEVTQNEGTKTVANNLTSTIQVFTDSEYQLPYVLGSAHQGCLPPFPADVFMIPQYGYLTLNNGSQAVGRSSFYCLEYFPSQMLRTGNNFEFSYTFEDVPFHSSYAHSQSLDRLMNPLIDQYLYYLSRTQSTGGTQGTQQLLFSQAGPANMSAQAKNWLPGPCYRQQRVSTTLSQNNNSNFAWTGATKYHLNGRDSLVNPGVAMATHKDDEERFFPSSGVLMFGKQGAGRDNVDYSSVMLTSEEEIKTTNPVATEQYGVVADNLQQTNTGPIVGNVNSQGALPGMVWQNRDVYLQGPIWAKIPHTDGNFHPSPLMGGFGLKHPPPQILIKNTPVPADPPTTFSQAKLASFITQYSTGQVSVEIEWELQKENSKRWNPEIQYTSNYYKSTNVDFAVNTEGTYSEPRPIGTRYLTRNL

SEQ ID NO: 626 - DNA, 2217 bp, unidentified
  source 1..2217: mol_type = unassigned DNA; note = Adeno-associated virus
atggctgctgacggttatcttccagattggctcgaggacaacctctctgagggcattcgcgagtggtgggacctgaaacctggagcccccaagcccaaggccaaccagcagaagcaggacgacggccggggtctggtgcttcctggctacaagtacctcggacccttcaacggactcgacaagggggagcccgtcaacgcggcggacgcagcggccctcgagcacgacaaggcctacgaccagcagctcaaagcgggtgacaatccgtacctgcggtataaccacgccgacgccgagtttcaggagcgtctacaagaagatacgtcttttgggggcaacctcgggcgagcagtcttccaggccaagaagcgggttctcgaacctctcggtccggttgaggaagctgctaagacggctcctggaaagaagagaccggtagaaccgccacctcagcgttcccccgactcctccacgggcatcggcaagaaaggccagcagcccgctaaaaagagactgaactttggtcagactggcgactcagagtcagtccccgaccctcaaccaatcggagaaccaccagcaggcccctctggtctgggatctggtacaatggctgcaggcggtggcgctccaatggcagacaataacgaaggcgccgacggagtgggtagttcctcaggaaattggcattgcgattccacatggctgggcgacagagtcatcaccaccagcacccgaacctgggccctgcccacctacaacaaccacctctacaagcaaatatccaatgggacatcgggaggaagcaccaacgacaacacctacttcggctacagcaccccctgggggtattttgacttcaacagattccactgccacttctcaccacgtgactggcagcgactcatcaacaacaactggggattccggccaaaaagactcagcttcaagctcttcaacatccaggtcaaggaggtcacgcagaatgaaggcaccaagaccgtcgccaataaccttaccagcacgattcaggtatttacggactcggaataccagctgccgtacgtcctcggctccgcgcaccagggctgcctgcctccgttcccggcggacgtcttcatgattccccagtacggctaccttacactgaacaatggaagtcaagccgtaggccgttcctccttctactgcctggaatattttccatctcaaatgctgcgaactggaaacaattttgaattcagctacaccttcgaggacgtgcctttccacagcagctacgcacacagccagagcttggaccgactgatgaatcctctcatcgaccagtacctgtactacttatccagaactcagtccacaggaggaactcaaggtacccagcaattgttattttctcaagctgggcctgcaaacatgtcggctcaggctaagaactggctacctggaccttgctaccggcagcagcgagtctctacgacactgtcgcaaaacaacaacagcaactttgcttggactggtgccaccaaatatcacctgaacggaagagactctttggtaaatcccggtgtcgccatggcaacccacaaggacgacgaggaacgcttcttcccgtcgagtggagtcctgatgtttggaaaacagggtgctggaagagacaatgtggactacagcagcgttatgctaaccagcgaagaagaaattaaaaccactaaccctgtagccacagaacaatacggtgtggtggctgacaacttgcagcaaaccaatacagggcctattgtgggaaatgtcaacagccaaggagccttacctggcatggtctggcagaaccgagacgtgtacctgcagggtcccatctgggccaagattcctcacacggacggcaacttccacccttcaccgctaatgggaggatttggactgaagcacccacctcctcagatcctgatcaagaacacgccggtacctgcggatcctccaacaacgttcagccaggcgaaattggcttccttcattacgcagtacagcaccggacaggtcagcgtggaaatcgagtgggagctgcagaaggagaacagcaaacgttggaacccagagattcagtacacttcaaactactacaaatctacaaatgtggactttgctgtcaatacagagggaacttattctgagcctcgccccattggtactcgttacctcacccgtaatctgtaa

SEQ ID NO: 627 - protein, 738 aa, unidentified
  source 1..738: note = Adeno-associated virus
MAADGYLPDWLEDNLSEGIREWWDLKPGAPKPKANQQKQDDGRGLVLPGYKYLGPFNGLDKGEPVNAADAAALEHDKAYDQQLKAGDNPYLRYNHADAEFQERLQEDTSFGGNLGRAVFQAKKRVLEPLGLVEEAAKTAPGKKRPVEPSPQRSPDSSTGIGKKGQQPAKKRLNFGQTGDSESVPDPQPIGEPPAGPSGLGSGTMAAGGGAPMADNNEGADGVGSSSGNWHCDSTWLGDRVITTSTRTWALPTYNNHLYKQISNGTSGGSTNDNTYFGYSTPWGYFDFNRFHCHFSPRDWQRLINNNWGFRPKRLSFKLFNIQVKEVTQNEGTKTIANNLTSTIQVFTDSEYQLPYVLGSAHQGCLPPFPADVFMIPQYGYLTLNNGSQAVGRSSFYCLEYFPSQMLRTGNNFEFSYTFEDVPFHSSYAHSQSLDRLMNPLIDQYLYYLSRTQSTGGTQGTQQLLFSQAGPANMSAQAKNWLPGPCYRQQRVSTTLSQSNNSNFAWTGATKYHLNGRDSLVNPGVAMATHKDDEERFFPSSGVLMFGKQGAGRDNVDYSSVMLTSEEEIKTTNPVATEQYGVVADNLQQTNTGPIVGNVNSQGALPGMVWQNRDVYLQGPIWAKIPHTDGNFHPSPLMGGLGLKHPPPQILIKNTPVPADPPTTFSQAKLASFITQYSTGQVSVEIEWELQKENSKRWNPEIQYTSNYYKSTNVDFAVNTEGTYSEPRPIGTRYLTRNL

SEQ ID NO: 628 - DNA, 2217 bp, unidentified
  source 1..2217: mol_type = unassigned DNA; note = Adeno-associated virus
atggctgctgacggttatcttccagattggctcgaggacaacctctctgagggcattcgcgagtggtgggacctgaaacctggagcccccaagcccaaggccaaccagcagaagcaggacgacggccggggtctggtgcttcctggctacaagtacctcggacccttcaacggactcgacaagggggagcccgtcaacgcggcggacgcagcggccctcgagcacgacaaggcctacgaccagcagctcaaagcgggtgacaatccgtacctgcggtataaccacgccgacgccgagtttcaggagcgtctgcaagaagatacgtcttttgggggcaacctcgggcgagcagtcttccaggccaagaagcgggttctcgaacctctcggtctggttgaggaagcggctaagacggctcctggaaagaagagaccggtagaaccgtcacctcagcgttcccccgactcctccacgggcatcggcaagaaaggccagcagcccgctaaaaagagactgaactttggtcagactggcgactcagagtcagtccccgaccctcaaccaatcggagaaccaccagcaggcccctctggtctgggatctggtacaatggctgcaggcggtggcgctccaatggcagacaataacgaaggcgccgacggagtgggtagttcctcaggaaattggcattgcgattccacatggctgggcgacagagtcatcaccaccagcacccgaacctgggccctgcccacctacaacaaccacctctacaagcaaatatccaatgggacatcgggaggaagcaccaacgacaacacctacttcggctacagcaccccctgggggtattttgacttcaacagattccactgccacttctcaccacgtgactggcagcgactcatcaacaacaactggggattccggccaaaaagactcagcttcaagctcttcaacatccaggtcaaggaggtcacgcagaatgaaggcaccaagaccatcgccaataaccttaccagcacgattcaggtatttacggactcggaataccagctgccgtacgtcctcggctccgcgcaccagggctgcctgcctccgttcccggcggacgtcttcatgattccccagtacggctaccttacactgaacaatggaagtcaagccgtaggccgttcctccttctactgcctggaatattttccatctcaaatgctgcgaactggaaacaattttgaattcagctacaccttcgaggacgtgcctttccacagcagctacgcacacagccagagcttggaccgactgatgaatcctctcatcgaccagtacctgtactacttatccagaactcagtccacaggaggaactcaaggtacccagcaattgttattttctcaagctgggcctgcaaacatgtcggctcaggctaagaactggctacctggaccttgctaccggcagcagcgagtctctacgacactgtcgcaaagcaacaacagcaactttgcttggactggtgccaccaaatatcacctgaacggaagagactctttggtaaatcccggtgtcgccatggcaacccacaaggacgacgaggaacgcttcttcccgtcgagtggagtcctgatgtttggaaaacagggtgctggaagagacaatgtggactacagcagcgttatgctaaccagcgaagaagaaattaaaaccactaaccctgtagccacagaacaatacggtgtggtggctgacaacttgcagcaaaccaatacagggcctattgtgggaaatgtcaacagccaaggagccttacctggcatggtctggcagaaccgagacgtgtacctgcagggtcccatctgggccaagattcctcacacggacggcaacttccacccttcaccgctaatgggaggacttggactgaagcacccacctcctcagatcctgatcaagaacacgccggtacctgcggatcctccaacaacgttcagccaggcgaaattggcttccttcattacgcagtacagcaccggacaggtcagcgtggaaatcgagtgggagctgcagaaggagaacagcaaacgctggaacccagagattcagtacacttcaaactactacaaatctacaaatgtggactttgctgtcaatacagagggaacttattctgagcctcgccccattggtactcgttacctcacccgtaatctgtaa

SEQ ID NO: 629 - protein, 737 aa, unidentified
  source 1..737: note = Adeno-associated virus
MAADGYLPDWLEDNLSEGIREWWDLKPGAPKPKANQQKQDDGRGLVLPGYKYLGPFNGLDKGEPVNAADAAALEHDKAYDQQLKAGDNPYPRYNHADAEFQERLQEDTPFGGNLGRAVFQAKKRVLEPLGLVEEAAKTAPGKKRPVEPSPQRSPDSSTGIGKKGQQPAKKRLNFGQTGDSESVPDPQPIGEPPAGPSGLGSGTMAAGGGAPMADNNEGADGVGNASGNWHCDSTWLGDRVITTSTRTWALPTYNNHLYKQISSASTGASNDNHYFGYSTPWGYFDFNRFHCHFSPRDWQRLINNNWGFRPKRLNFKLFNIQVKEVTTNDGVTTIANNLTSTVQVFSDSEYQLPYVLGSAHQGCLPPFPADVFMIPQYGYLTLNNGSQAVGRSSFYCLEYFPSQMLRTGNNFTFSYTFEEVPLHSSYAHSQSLDRLMNPLIVQYLYYLNRTQNQSGSAQNKDLLFSRGSPAGMSVQPKNWLPGPCYRQQRVSKTKTDNNNSNFTWTGASKYNLNGRESIINPGTAMASHKDDEDKFFPMSGVMIFGKESAGASNTALDNVMITDEEEIKATNPVATERFGTVAVNFQSSSTDPATGDVHAMGALPGMVWQDRDVYLQGPIWAKIPHTDGHFHPSPLMGGFGLKNPPPQILIKNTPVPANPPAEFSATKFASFITQYSTGQVSVEIEWELQKENSKRWNPEVQYTSNYAKSASVDFTVDNNGLYTEPRPIGTRYLTRPL

SEQ ID NO: 630 - protein, 737 aa, unidentified
  source 1..737: note = Adeno-associated virus
MAADGYLPDWLEDNLSEGIREWWDLKPGAPKPKANQQKQDDGRGLVLPGYKYLGPFNGLDKGEPVNAADAAALEHDKAYDQQLKAGDNPYPRYNHADAEFQERLQEDTSFGGNLGRAVFQAKKRVLEPLGLVEEAAKTAPGKKRPVEPSPQRSPDSSTGIGKKGQQPAKKRLNFGQTGDSESVPDPQPIGEPPAGPSGLGSGTMAAGGGAPMADNNEGADGVGNASGNWHCDSTWLGDRVITTSTRTWALPTYNNHLYKQISSASTGASNDNHYFGYSTPWGYFDFNRFHCHFSPRDWQRLINNNWGFRPKRLNFKLFNIQVKEVTTNDGVTTIANNLTSTVQVFSDSEYQLPYVLGSAHQGCLPPFPADVFMIPQYGYLTLNNGSQAVGRSSFYCLEYFPSQMLRTGNNFTFSYTFEEVPLHSSYAHSQSLDRLMNPLIDQYLYYLNRTQNQSGSAQNKDLLFSRGSPAGMSVQPKNWLPGPCYRQQRVSKTKTDNNNSNFTWTGASKYNLNGRESIINPGTAMASHKDDEDKFFPMSGVMIFGKESAGASNTALDNVMITDEEEIKATNPVATERFGTVAVNFQSSSTDPATGDVHAMGALPGMVWQDRDVYLQGPIWAKIPHTDGHFHPSPLMGGFGLKNPPPQILIKNTPVPANPPAEFSATKFASFITQYSTGQVSVEIEWELQKENSKRWNPEVQYTSNYAKSASVDFTVDNNGLYTEPRPIGTRYLTRPL

SEQ ID NO: 631 - DNA, 2214 bp, unidentified
  source 1..2214: mol_type = unassigned DNA; note = Adeno-associated virus
atggctgctgacggttatcttccagattggctcgaggacaacctctctgagggcattcgcgagtggtgggacctgaaacctggagcccccaagcccaaggccaaccagcagaagcaggacgacggccggggtctggtgcttcctggctacaagtacctcggacccttcaacggactcgacaagggggagcccgtcaacgcggcggacgcagcggccctcgagcacgacaaggcctacgaccagcagctcaaagcgggtgacaatccgtacccgcggtataaccacgccgacgccgagtttcaggagcgtctgcaagaagatacgccttttgggggcaacctcgggcgagcagtcttccaggccaagaagcgggttctcgaacctctcggtctggttgaggaagctgctaagacggctcctggaaagaagagaccggtagaaccgtcacctcagcgttcccccgactcctccacgggcatcggcaagaaaggccagcagcccgctaaaaagagactgaactttggtcagactggcgactcagagtcagtccccgaccctcaaccaatcggagaaccaccagcaggcccctctggtctgggatctggtacaatggctgcaggcggtggcgctccaatggcagacaataacgaaggcgccgacggagtgggtaatgcctcaggaaattggcattgcgattccacatggctgggcgacagagtcatcaccaccagcacccgcacctgggccttgcccacctacaataaccacctctacaagcaaatctccagtgcttcaacgggggccagcaacgacaaccactacttcggctacagcaccccctgggggtattttgatttcaacagattccactgccacttttcaccacgtgactggcagcgactcatcaacaacaattggggattccggcccaagagactcaacttcaaactcttcaacatccaagtcaaggaggtcacgacgaatgatggcgtcacaaccatcgctaataaccttaccagcacggttcaagtcttctcggactcggagtaccagcttccgtacgtcctcggctctgcgcaccagggctgcctccctccgttcccggcggacgtgttcatgattccgcaatacggctacctgacgctcaacaatggcagccaagccgtgggacgttcatccttttactgcctggaatatttcccttctcagatgctgagaacgggcaacaactttaccttcagctacacctttgaggaagtgcctctccacagcagctacgcgcacagccagagcctggaccggctgatgaatcctctcatcgtccaatacctgtattacctgaacagaactcaaaatcagtccggaagtgcccaaaacaaggacttgctgttcagccgtgggtctccagctggcatgtctgttcagcccaaaaactggctacctggaccctgttatcggcagcagcgcgtttctaaaacaaaaacagacaacaacaacagcaattttacctggactggtgcttcaaaatataacctcaatgggcgtgaatccatcatcaaccctggcactgctatggcctcacacaaagacgacgaagacaagttctttcccatgagcggtgtcatgatttttggaaaagagagcgccggagcttcaaacactgcattggacaatgtcatgattacagacgaagaggaaattaaagccactaaccctgtggccaccgaaagatttgggaccgtggcagtcaatttccagagcagcagcacagaccctgcgaccggagatgtgcatgctatgggagcattacctggcatggtgtggcaagatagagacgtgtacctgcagggtcccatttgggccaaaattcctcacacagatggacactttcacccgtctcctcttatgggcggctttggactcaagaacccgcctcctcagatcctcatcaaaaacacgcctgttcctgcgaatcctccggcggagttttcagctacaaagtttgcttcattcatcacccaatactccacaggacaagtgagtgtggaaattgaatgggagctgcagaaagaaaacagcaagcgctggaatcccgaagtgcagtacacatccaattatgcaaaatctgccagcgttgattttactgtggacaacaatggactttatactgagcctcgccccattggcacccgttaccttacccgtcccctgtaa

SEQ ID NO: 632 - protein, 736 aa, unidentified
  source 1..736: note = Adeno-associated virus
MAADGYLPDWLEDTLSEGIRQWWKLRPGPPPPKPAERHKDDSRGLVLPGYKYLGPFNGLDKGEPVNEADAAALEHDKAYDRQLDSGDNPYLKYNHADAEFQERLKEDTSFGGNLGRAVFQAKKRVLEPLGLVEEGAETAPGKKRPVEQSPQGPDSSSGIGKTGQQPAKKRLNFGQTGDSESVPDPQPLGEPPATPAAVGPTTMASGGGAPMADNNEGADGVGNASGNWHCDSTWLGDRVITTSTRTWALPTYNNHLYKQISSASTGASNDNHYFGYSTPWGYFDFNRFHCHFSPRDWQRLINNNWGFRPKRLNFKLFNIQVKEVTTNDGVTTIANNLTSTVQVFSDSEYQLPYVLGSAHQGCLPPFPADVFMIPQYGYLTLNNGSQAVGRSSFYCLEYFPSQMLRTGNNFTFSYTFEEVPFHSSYAHSQSLDRLMNPLIDQYLYYPNRTQNQSGSAQNKDLLFSRGSPAGMSVQPKNWLPGPCYRQQRVSKTKTDNNNSNFTWTGASKYNLNGRESIINPGTAMASHKDDEDKFFPMSGVMIFGKESAGASNTALDNVMITDEEEIKATNPVATERFGTVAVNFQSSSTDPATGDVHAMGALPGMVWQGRDVYLQGPIWAKIPHTDGHFHPSPLMGGFGLKNPPPQILIKNTPVPANPPAEFSATKFASFITQYSTGQVSVEIEWELQKENSKRWNPEVQYTSNYAKSANVDFTVDNNGLYTEPRPIGTRYLTRPL

SEQ ID NO: 633 - DNA, 2211 bp, unidentified
  source 1..2211: mol_type = unassigned DNA; note = Adeno-associated virus
atggctgccgatggttatcttccagattggctcgaggacactctctctgaaggaataagacagtggtggaagctcagacctggcccaccaccaccaaagcccgcagagcggcataaggacgacagcaggggtcttgtgcttcctgggtacaagtacctcggacccttcaacggactcgacaagggagagccggtcaacgaggcagacgccgcggccctcgagcacgacaaagcctacgaccggcagctcgacagcggagacaacccgtacctcaagtacaaccacgccgacgcggagtttcaggagcgccttaaagaagatacgtcttttgggggcaacctcgggcgagcagtcttccaggccaagaagcgggttctcgaacctctcggtctggttgaggaaggcgctgagacggctcctggaaagaaacgtccggtagagcagtcgccacaagggccagactcctcctcgggcatcggcaagacaggccagcagcccgctaaaaagagactcaattttggtcagactggcgactcagagtcagtccccgatccacaacctctcggagaacctccagcaacccccgctgctgtgggacctactacaatggcttcaggcggtggcgcaccaatggcagacaataacgaaggcgccgacggagtgggtaatgcctcaggaaattggcattgcgattccacatggctgggcgacagagtcatcaccaccagcacccgcacctgggccttgcccacctacaataaccacctctacaagcaaatctccagtgcttcaacgggggccagcaacgacaaccactacttcggctacagcaccccctgggggtattttgatttcaacagattccactgccacttttcaccacgtgactggcagcgactcatcaacaacaattggggattccggcccaagagactcaacttcaaactcttcaacatccaagtcaaggaggtcacgacgaatgatggcgtcacaaccatcgctaataaccttaccagcacggttcaagtcttctcggactcggagtaccagcttccgtacgtcctcggctctgcgcaccagggctgcctccctccgttcccggcggacgtgttcatgattccgcaatacggctacctgacgctcaacaatggcagccaagccgtgggacgttcatccttttactgcctggaatatttcccttctcagatgctgagaacgggcaacaactttaccttcagctacacctttgaggaagtgcctttccacagcagctacgcgcacagccagagcctggaccggctgatgaatcctctcatcgaccaatacctgtattacccgaacagaactcaaaatcagtccggaagtgcccaaaacaaggacttgctgtttagccgtgggtctccagctggcatgtctgttcagcccaaaaactggctacctggaccctgttatcggcagcagcgcgtttctaaaacaaaaacagacaacaacaacagcaattttacctggactggtgcttcaaaatataacctcaatgggcgtgaatccatcatcaaccctggcactgctatggcctcacacaaagacgacgaagacaagttctttcccatgagcggtgtcatgatttttggaaaagagagcgccggagcttcaaacactgcattggacaatgtcatgattacagacgaagaggaaattaaagccactaaccctgtggccaccgaaagatttgggaccgtggcagtcaatttccagagcagcagcacagaccctgcgaccggagatgtgcatgctatgggagcattacctggcatggtgtggcaaggtagagacgtgtacctgcagggtcccatttgggccaaaattcctcacacagatggacactttcacccgtctcctcttatgggcggctttggactcaagaacccgcctcctcagatcctcatcaaaaacacgcctgttcctgcgaatcctccggcggagttttcagctacaaagtttgcttcattcatcacccaatactccacaggacaagtgagtgtggaaattgaatgggagctgcagaaagaaaacagcaagcgctggaatcccgaagtgcagtacacatccaattatgcaaaatctgccaacgttgattttactgtggacaacaatggactttatactgagcctcgccccattggcacccgttaccttacccgtcccctgtaa

SEQ ID NO: 634 - protein, 736 aa, unidentified
  source 1..736: note = Adeno-associated virus
MAADGYLPDWLEDTLSEGIRQWWKLRPGPPPPKPAERHKDDSRGLVLPGYKYLGPFNGLDKGEPVNEADAAALEHDKAYDRQLDSGDNPYLKYNHADAEFQERLKEDTSFGGNLGRAVFQAKKRVLEPLGLVEEGAKTAPGKKRPVEQSPQGPDSSSGIGKTGQQPAKKRLNFGQTGDSESVPDPQPLGEPPATPAAVGPTTMASGGGAPMADNNEGADGVGNASGNWHCDSTWLGDRVITTSTRTWALPTYNNHLYKQISSASTGASNDNHYFGYSTPWGYFDFNRFHCHFSPRDWQRLINNNWGFRPKRLNFKLFNIQVKEVTTNDGVTTIANNLTSTVQVFSDSEYQLPYVLGSAHQGCLPPFPADVFMIPQYGYLTLNNGSQAVGRSSFYCLEYFPSQMLRTGNNFTFSYTFEEVPFHSSYAHSQSLDRLMNPLIDQYLYYPNRTQNQSGSAQNKDLLFSRGSPAGMSVQPKNWLPGPCYRQQRVSKTKTDNNNSNFTWTGASKYNLNGRESIINPGTAMASHKDDEDKFFPMSGVMIFGKESAGASNTALDNVMITDEEEIKATNPVATERFGTVAVNFQSSSTDPATGDVHAMGALPGMVWQGRDVYLQGPIWAKIPHTDGHFHPSPLMGGFGLKNPPPQILIKNTPVPANPPAEFSATKFASFITQYSTGQVSVEIEWELQKENSKRWNPEVQYTSNYAKSANVDFTVDNNGLYTEPRPIGTRYLTRPL

SEQ ID NO: 635 - protein, 736 aa, unidentified
  source 1..736: note = Adeno-associated virus
MAADGYLPDWLEDTLSEGIRQWWKLRPGPPPPKPAERHKDDSRGLVLPGYKYLGPFNGLDKGEPVNEADAAALEHDKAYDRQLDSGDNPYLKYNHADAEFQERLKEDTSFGGNLGRAVFQAKKRVLEPLGLVEEGAKTAPGKKRPVEQSPQGPDSSSGIGKTGQQPAKKRLNFGQTGDSESVPDPQPLGEPPATPAAVGPTTMASGGGAPMADNNEGADGVGNASGNWHCDSTWLGDRVITTSTRTWALPTYNNHLYKQISSASTGASNDNHYFGYSTPWGYFDFNRFHCHFSPRDWQRLINNNWGFRPKRLNFKLFNIQVKEVTTNDGVTTIANNLTSTVQVFSDSEYQLPYVLGSAHQGCLPPFPADVFMIPQYGYLTLNNGSQAVGRSSFYCLEYFPSQMLRTGNNFTFSYTFEEVPFHSSYAHSQSLDRLMNPLIDQYLYYLNRTQNQSGSAQNKDLLFSRGSPAGMSVQPKNWLPGPCYRQQRVSKTKTDNNNSNFTWTGASKYNLNGRESIINPGTAMASHKDDEDKFFPMSGVMIFGKESAGASNTALDNVMITDEEEIKATNPVATERFGTVAVNFQSSSTDPATGDVHAMGALPGMVWQGRDVYLQGPIWAKIPHTDGHFHPSPLMGGFGLKNPPPQILIKNTPVPANPPAEFSATKFASFITQYSTGQVSVEIEWELQKENSKRWNPEVQYTSNYAKSANVDFTVDNNGLYTEPRPIGTRYLTRPL

SEQ ID NO: 636 - protein, 736 aa, unidentified
  source 1..736: note = Adeno-associated virus
MAADGYLPDWLEDTLSEGIRQWWKLRPGPPPPKPAERHKDDSRGLVLPGYKYLGPFNGLDKGEPVNEADAAALEHDKAYDRQLDSGDNPYLKYNHADAEFQERLKEDTSFGGNLGRAVFQAKKRVLEPLGLVEEGAKTAPGKKRPVEQSPQGPDSSSGIGKTGQQPAKKRLNFGQTGDSESVPDPQPLGEPPATPAAVGPTTMASGGGAPMADNNEGADGVGNASGNWHCDSTWLGDRVITTSTRTWALPTYNNHLYKQISSASTGASNDNHYFGYSTPWGYFDFNRFHCHFSPRDWQRLINNNWGFRPKRLNFKLFNIQVKEVTTNDGVTTIANNLTSTVQVFSDSEYQLPYVLGSAHQGCLPPFPADVFMIPQYGYLTLNNGSQAVGRSSFYCLEYFPSQMLRTGNNFTFSYTFEEVPFHSSYAHSQSLDRLMNPLIDQYLYYLNRTQNQSGSAQNKDLLFSRGSPAGMSVQPKNWLPGPCYRQQRVSKTKTDNNNSNFTWTGASKYNLNGRESIINPGTAMASHKDDEDKFFPMSGVMIFGKESAGASNTALDNVMITDEEEIKATNPVATERFGTVAVNFQSSSTDPATGDVHAMGALPGMVWQDRDVYLQGPIWAKIPHTDGHFHPSPLMGGFGLKNPPPQILIKNTPVPANPPAEFSATKFASFITQYSTGQVSVEIEWELQKENSKRWNPEVQYTSNYAKSANVDFTVDNNGLYTEPRPIGTRYLTRPL

SEQ ID NO: 637 - DNA, 2208 bp, unidentified
  source 1..2208: mol_type = unassigned DNA; note = Adeno-associated virus
atggctgccgatggctatcttccagattggctcgaggacactctctctgaaggaataagacagtggtggaagctcaaacctggcccaccaccaccaaagcccgcagagcggcatagggacgacagcaggggtcttgtgcttcctgggtacaagtacctcggacccttcaacggactcgacaagggagagccggtcaacgaggcagacgccgcggccctcgagcacgacaaagcctacgaccggcagctcgacagcggagacaacccgtacctcaagtacaaccacgccgacgcggagtttcaggagcgccttaaagaagatacgtcttttgggggcaacctcggacgagcagtcttccaggcgaaaaagagggttcttgaacctctgggcctggttgaggaacctgttaagacggctccgggaaaaaagaggccggtagagcactctcctgtggagccagactcctcctcgggaaccggaaaggcgggccagcagcctgcaagaaaaagattgaattttggtcagactggagacgcagactcagtacctgacccccagcctctcggacagccaccagcagccccctctggtctgggaactaatacgatggctacaggcagtggcgcaccaatggcagacaataacgagggcgccgacggagtgggtaattcctcgggaaattggcattgcgattccacatggatgggcgacagagtcatcaccaccagcacccgaacctgggccctgcccacctacaacaaccacctctacaaacaaatttccagccaatcaggagcctcgaacgacaatcactactttggctacagcaccccttgggggtattttgacttcaacagattccactgccacttttcaccacgtgactggcaaagactcatcaacaacaactggggattccgacccaagagactcaacttcaagctctttaacattcaagtcaaagaggtcacgcagaatgacggtacgacgacgattgccaataaccttaccagcacggttcaggtgtttactgactcggggtaccagctcccgtacgtcctcggctcggcgcatcaaggatgcctcccgccgttcccagcagacgtcttcatggtgccacagtatggataccccaccctgaacaacgggagtcaggcagtaggacgctcttcattttactgcctggagtactttccttctcagatgctgcgtaccggaaacaactttaccttcagctacacttttgaggacgttcctttccacagcagctacgctcacagccagagtctggaccgtctcatgaatcctctcatcgaccagtacctgtattacttgagcacaacaaacactccaagtggaaccaccacgcagtcaaggcttcagttttctcaggccggagcgagtgacattcgggaccagtctaggaactggcttcctggaccctgttaccgccagcagcgagtatcaaagacatctgcggataacaacaacagtgaatactcgtggactggagctaccaagtaccacctcaatggcagagactctctggtgaatccgggcccggccgtggcaagccacaaggacgatgaagaaaagttttttcctcagagcggggttctcatctttgggaagcaaggctcagagaaaacaaatgtggacattgaaaaggtcatgattacagacgaagaggaaatcaggacaaccaatcccgtggctacggagcagtatggttctgtatctaccaacctccagagaggcaacagacaagcagctaccgcagatgtcaacacacaaggcgttcttccaggcatggtctggcaggacagagatgtgtaccttcaggggcccatctgggcaaagattccacacacggacggacattttcacccctctcccctcatgggtggattcggacttaaacaccctcctccacagattctcatcaagaacaccccggtacctgcgaatccttcgaccaccttcagtgcggcaaagtttgcttccttcatcacacagtactccacgggacaggtcagcgtggagatcgagtgggagctgcagaaggaaaacagcaaacgctggaatcccgaaattcagtacacttccaactacaacaagtctgttaatgtggactttactgtggacactaatggcgtgtattcagagcctcgccccattggcaccagatacctgactcgtaatctgtaa

SEQ ID NO: 638 - protein, 735 aa, unidentified
  source 1..735: note = Adeno-associated virus
MAADGYLPDWLEDTLSEGIRQWWKLKPGPPPPKPAERHRDDSRGLVLPGYKYLGPFNGLDKGEPVNEADAAALEHDKAYDRQLDSGDNPYLKYNHADAEFQERLKEDTSFGGNLGRAVFQAKKRVLEPLGLVEEPVKTAPGKKRPVEHSPVEPDSSSGTGKAGQQPARKRLNFGQTGDADSVPDPQPLGQPPAAPSGLGTNTMATGSGAPMADNNEGADGVGNSSGNWHCDSTWMGDRVITTSTRTWALPTYNNHLYKQISSQSGASNDNHYFGYSTPWGYFDFNRFHCHFSPRDWQRLINNNWGFRPKRLNFKLFNIQVKEVTQNDGTTTIANNLTSTVQVFTDSGYQLPYVLGSAHQGCLPPFPADVFMVPQYGYPTLNNGSQAVGRSSFYCLEYFPSQMLRTGNNFTFSYTFEDVPFHSSYAHSQSLDRLMNPLIDQYLYYLSTTNTPSGTTTQSRLQFSQAGASDIRDQSRNWLPGPCYRQQRVSKTSADNNNSEYSWTGATKYHLNGRDSLVNPGPAVASHKDDEEKFFPQSGVLIFGKQGSEKTNVDIEKVMITDEEEIRTTNPVATEQYGSVSTNLQRGNRQAATADVNTQGVLPGMVWQDRDVYLQGPIWAKIPHTDGHFHPSPLMGGFGLKHPPPQILIKNTPVPANPSTTFSAAKFASFITQYSTGQVSVEIEWELQKENSKRWNPEIQYTSNYNKSVNVDFTVDTNGVYSEPRPIGTRYLTRNL

SEQ ID NO: 639 - DNA, 2211 bp, unidentified
  source 1..2211: mol_type = unassigned DNA; note = Adeno-associated virus
atggctgccgacggttatcttccagattggctcgaggacactctctctgaaggaataagacagtggtggaagctcaaacctggcccaccaccaccaaagcccgcagagcggcataaggacgacagcaggggtcttgtgcttcctgggtacaagtacctcggacccttcaacggactcgacaagggagagccggtcaacgaggcagacgccgcggccctcgagcacgacaaagcctacgaccggcagctcgacagcggagacaacccgtacctcaagtacaaccacgccgacgcggagtttcaggagcgccttaaagaagatacgtcttttgggggcaacctcgggcgggcagtcttccaggccaagaagcgggttctcgaacctctcggtctggttgaggaaggcgctaagacggctcctggaaagaaacgtccggtagagcagtcgccacaagagccagactccccctcgggcatcggcaagacaggccagcagcccgctaaaaagagactcaattttggtcagactggcgactcagagtcagtccccgatccacaacctctcggagaacctccagcaacccccgctgctgtgggacctactacaatggcttcaggcggtggcgcaccaatggcagacaataacgaaggcgccgacggagtgggtaatgcctcaggaaattggcactgcgattccacatggctgggcgacagagtcatcaccaccagcacccgcacctgggccttgcccacctacaataaccacctctacaagcaaatctccagtgcttcaacgggggccagcaacgacaaccactacttcggctacagcaccccctgggggtattttgatttcaacagattccactgccacttttcaccacgtgactggcagcgactcatcaacaacaattggggattccggcccaagagactcaacttcaaactcttcaacatccaagtcaaggaggtcacgacgaatgatggcgtcacaaccatcgctaataaccttaccagcacggttcaagtcttctcggactcggagtaccagcttccgtacgtcctcggctctgcgcaccagggccgcctccctccgttcccggcggacgtgttcatgattccgcaatacggctacctgacgctcaacaatggcagccaagccgtgggacgttcatcctcttactgcctggaatatttcccttctcagatgctgagaacgggcaacaactttaccttcagctacacctttgaggaagtgcctctccacagcagctgcgcgcacagccagagcctggaccggctgatgaatcctctcatcgaccaatacctgtattacctgaacagaactcaaaatcagtccggaagtgcccaaaacagggacttgctgttcagccgtgggtctccagctggcatgtctgttcagcccaaaaactggctacctggaccctgttatcggcagcagcgcgtttctaaaacaaaaacagacaacaacaacagcaattttacctggactggtgcttcaaaatataacctcaatgggcgtgaatccatcatcaaccctggcactgctatggcctcacacaaagacgacgaagacaagttctttcccatgagcggtgtcatgatttttggaaaagagagcgccggagcttcaaacactgcattggacaatgtcatgattacagacgaagaggaaattaaagccactaaccctgtggccaccgaaagatttgggaccgtggcagtcaatttccagagcagcagcacagaccctgcgaccggagatgtgcatgctatgggagcattacctggcatggtgtggcaagatagagacgtgtacctgcagggtcccatttgggccaaaattcctcacacagatggacactttcacccgtctcctcttatgggcggctttggactcaagaacccgcctcctcagatcctcatcaaaaacacgcctgttcctgcgaatcctccggcggagttttcagctacaaagtttgcttcattcatcacccaatactccgcaggacaagtgagtgtggaaattgaatgggagctgcagaaagaaaacagcaagcgctggaatcccgaagtgcagtacacatccaattatgcaaaatctgccaacgttgattttactgtggacaacaatggactttatactgagcctcgccccattggcacccgttaccttacccgtcccctgtaa

SEQ ID NO: 640 - protein, 736 aa, unidentified
  source 1..736: note = Adeno-associated virus
MAADGYLPDWLEDTLSEGIRQWWKLKPGPPPPKPAERHKDDSRGLVLPGYKYLGPFNGLDKGEPVNEADAAALEHDKAYDRQLDSGDNPYLKYNHADAEFQERLKEDTSFGGNLGRAVFQAKKRVLEPLGLVEEGAKTAPGKKRPVEQSPQEPDSPSGIGKTGQQPAKKRLNFGQTGDSESVPDPQPLGEPPATPAAVGPTTMASGGGAPMADNNEGADGVGNASGNWHCDSTWLGDRVITTSTRTWALPTYNNHLYKQISSASTGASNDNHYFGYSTPWGYFDFNRFHCHFSPRDWQRLINNNWGFRPKRLNFKLFNIQVKEVTTNDGVTTIANNLTSTVQVFSDSEYQLPYVLGSAHQGRLPPFPADVFMIPQYGYLTLNNGSQAVGRSSSYCLEYFPSQMLRTGNNFTFSYTFEEVPLHSSCAHSQSLDRLMNPLIDQYLYYLNRTQNQSGSAQNRDLLFSRGSPAGMSVQPKNWLPGPCYRQQRVSKTKTDNNNSNFTWTGASKYNLNGRESIINPGTAMASHKDDEDKFFPMSGVMIFGKESAGASNTALDNVMITDEEEIKATNPVATERFGTVAVNFQSSSTDPATGDVHAMGALPGMVWQDRDVYLQGPIWAKIPHTDGHFHPSPLMGGFGLKNPPPQILIKNTPVPANPPAEFSATKFASFITQYSAGQVSVEIEWELQKENSKRWNPEVQYTSNYAKSANVDFTVDNNGLYTEPRPIGTRYLTRPL

SEQ ID NO: 641 - protein, 736 aa, unidentified
  source 1..736: note = Adeno-associated virus
MAADGYLPDWLEDTLSEGIRQWWKLKPGPPPPKPAERHKDDSRGLVLPGYKYLGPFNGLDKGEPVNEADAAALEHDKAYDRQLDSGDNPYLKYNHADAEFQERLKEDTSFGGNLGRAVFQAKKRVLEPLGLVEEGAKTAPGKKRPVEQSPQEPDSSSGIGKTGQQPAKKRLNFGQTGDSESVPDPQPLGEPPATPAAVGPTTMASGGGAPMADNNEGADGVGNASGNWHCDSTWLGDRVITTSTRTWALPTYNNHLYKQISSASTGASNDNHYFGYSTPWGYFDFNRFHCHFSPRDWQRLINNNWGFRPKRLNFKLFNIQVKEVTTNDGVTTIANNLTSTVQVFSDSEYQLPYVLGSAHQGCLPPFPADVFMIPQYGYLTLNNGSQAVGRSSFYCLEYFPSQMLRTGNNFTFSYTFEEVPLHSSCAHSQSLDRLMNPLIDQYLYYLNRTQNQSGSAQNRDLLFSRGSPAGMSVQPKNWLPGPCYRQQRVSKTKTDNNNSNFTWTGASKYNLNGRESIINPGTAMASHKDDEDKFFPMSGVMIFGKESAGASNTALDNVMITDEEEIKATNPVATERFGTVAVNFQSSSTDPATGDVHAMGALPGMVWQDRDVYLQGPIWAKIPHTDGHFHPSPLMGGFGLKNPPPQILIKNTPVPANPPAEFSATKFASFITQYSTGQVSVEIEWELQKENSKRWNPEVQYTSNYAKSANVDFTVDNNGLYTEPRPIGTRYLTRPL

SEQ ID NO: 642 - DNA, 2208 bp, unidentified
  source 1..2208: mol_type = unassigned DNA; note = Adeno-associated virus
atggctgccgatggctatcttccagattggctcgaggacactctctctgaaggaataagacagtggtggaagctcaaacctggcccaccaccaccaaagcccgcagagcggcatagggacgacagcaggggtcttgtgcttcctgggtacaagtacctcggacccttcaacggactcgacaagggagagccggtcaacgaggcagacgccgcggccctcgagcacgacaaagcctacgaccggcagctcgacagcggagacaacccgtacctcaagtacaaccacgccgacgcggagtttcaggagcgccttaaagaagatacgtcttttgggggcaacctcggacgagcagtcttccaggcgaaaaagagggttcttgaacctctgggcctggttggggaacctgttaagacggctccgggaaaaaagaggccggtagagcactctcctgtggagccagactcctcctcgggaaccggaaaggcgggccagcagcctgcaagaaaaagattgaattttggtcagactggagacgcagactcagtacctgacccccagcctctcggacagccaccagcagccccctctggtctgggaactaatacgatggctacaggcagtggcgcaccaatggcagacaataacgagggcgccgacggagtgggtaattcctcgggaaattggcattgcgattccacatggatgggcgacagagtcatcaccaccagcacccgaacctgggccctgcccacctacaacaaccacctctacaaacaaatttccagccaatcaggagcctcgaacgacagtcactactttggctacagcaccccttgggggtattttgacttcaacagattccactgccacttttcaccacgtgactggcaaagactcatcaacaacaactggggattccgacccaagagactcaacttcaagctctttaacattcaagtcaaagaggtcacgcagaatgacggtacgacgacgattgccaataaccttaccagcacggttcaggtgtttactgactcggagtaccagctcccgtacgtcctcggctcggcgcatcaaggatgcctcccgccgttcccagcagacgtcttcatggtgccacagtatggatacctcaccctgaacaacgggagtcaggcagtaggacgctcttcattttactgcctggagtactttccttctcagatgctgcgtaccggaaacaactttaccttcagctacacttttgaggacgttcctttccacagcagctacgctcacagccagagtctggaccgtctcatgaatcctctcatcgaccagtacctgtattacttgagcacaacaaacactccaagtggaaccaccacgcagtcaaggctccagttttctcaggccggagcgagtgacattcgggaccagtctaggaactggcttcctggaccctgttaccgccagcagcgagtatcaaagacatctgcggataacaacaacagtgaatactcgtggactggagctaccaagtaccacctcaatggcagagactctctggtgaatccgggcccggccatggcaagccacaaggacaatgaagaaaagttttttcctcagagcggggttctcatctttgggaagcaaggctcagagaaaacaaatgtggacattgaaaaggtcatgattacagacgaagaggaaatcaggacaaccaatcccgtggctacggagcagtatggttctgtatctaccaacctccagagaggcaacagacaagcagctaccgcagatgtcaacacacaaggcgttcttccaggcatggtctggcaggacagagatgtgtaccttcaggggcccatctgggcaaagattccacacacggacggacattttcacccctctcccctcatgggtggattcggacttaaacaccctcctccacagattctcatcaagaacaccccggtacctgcgaatccttcgaccaccttcagtgcggcaaagtttgcttccttcatcacacagtactccacgggacaggtcagcgtggagatcgagtgggagctgcagaaggaaaacagcaaacgctggaatcccgaaattcagtacacttccaactacaacaagtctgttaatgtggactttactgtggacactaatggcgtgtattcagagcctcgccccattggcaccagatacctgactcgtaatctgtaa

SEQ ID NO: 643 - protein, 735 aa, unidentified
  source 1..735: note = Adeno-associated virus
MAADGYLPDWLEDTLSEGIRQWWKLKPGPPPPKPAERHRDDSRGLVLPGYKYLGPFNGLDKGEPVNEADAAALEHDKAYDRQLDSGDNPYLKYNHADAEFQERLKEDTSFGGNLGRAVFQAKKRVLEPLGLVGEPVKTAPGKKRPVEHSPVEPDSSSGTGKAGQQPARKRLNFGQTGDADSVPDPQPLGQPPAAPSGLGTNTMATGSGAPMADNNEGADGVGNSSGNWHCDSTWMGDRVITTSTRTWALPTYNNHLYKQISSQSGASNDSHYFGYSTPWGYFDFNRFHCHFSPRDWQRLINNNWGFRPKRLNFKLFNIQVKEVTQNDGTTTIANNLTSTVQVFTDSEYQLPYVLGSAHQGCLPPFPADVFMVPQYGYLTLNNGSQAVGRSSFYCLEYFPSQMLRTGNNFTFSYTFEDVPFHSSYAHSQSLDRLMNPLIDQYLYYLSTTNTPSGTTTQSRLQFSQAGASDIRDQSRNWLPGPCYRQQRVSKTSADNNNSEYSWTGATKYHLNGRDSLVNPGPAMASHKDNEEKFFPQSGVLIFGKQGSEKTNVDIEKVMITDEEEIRTTNPVATEQYGSVSTNLQRGNRQAATADVNTQGVLPGMVWQDRDVYLQGPIWAKIPHTDGHFHPSPLMGGFGLKHPPPQILIKNTPVPANPSTTFSAAKFASFITQYSTGQVSVEIEWELQKENSKRWNPEIQYTSNYNKSVNVDFTVDTNGVYSEPRPIGTRYLTRNL

SEQ ID NO: 644 - protein, 737 aa, unidentified
  source 1..737: note = Adeno-associated virus
RMAADGYLPDWLEDNLSEGIREWWDLKPGAPKPKANQQKQDDGRGLVLPGYKYLGPFNGLDKGEPVNAADAAALEHDKAYDQQLKAGDNPYLRYNHADAEFQERLQEDTSFGGNLGRAVFQAKKRVLEPLGLVEEGAKTAPGKKRPVEQSPQEPDSSSGIGKTGQQPAKKRLNFGQTGDSESVPDPQPLGEPPATPAAVGPTTMASGGGAPMADNNEGADGVGNASGNWHCDSTWLGDRVITTSTRTWALPTYNNHLYKQISSTSTGASNDNHYFGYGTPWGYFDFNRFHCHFSPRDWQRLINNNWGFRPKRLNFKLFNIQVEEVTTNDGVTTIANNLTSTVQVFSDSEYQLPYVLGSAHQGCLPPFPADVFMIPQYGYLTLNNGSQAVGRSSFYCLEYFPSQMLRTGNNFTFSYTFEEVPFHSSYAHSQSLDRLMNPLIDQYLYYLNRTQNQSGSAQNKDLLFSRGSPAGMSVQPKNWLPGPCYRQQRVSKTKTDNNNSNFTWTGASKYNLNGRESIINPGTAVASHKDDEDKFFPMSGVMIFGKESAGASSTALDNVMITDEEEIKATNPVATERFGTVAVNFQSSSTDPATGDVHAMGALPGMVWQDRDVYLQGPIWAKIPHTDGHFHPSPLMGGFGLKNPPPQILIKNTPVPANPPAEFSATKFASFITQYSTGQVSVEIEWELQKENSKRWNPEVQYTSNYAKSANVDFTVDNNGLYTEPRPIGTRYLTRPL

SEQ ID NO: 645 - protein, 736 aa, unidentified
  source 1..736: note = Adeno-associated virus
MAADGYLPDWLEDNLSEGIREWWDLKPGAPKPKANQQKQDDGRGLVLPGYKYLGPFNGLDKGEPVNAADAAALEHDKAYDQQLKAGDNPYLRYNHADAEFQERLQEDTSFGGNLGRAVFQAKKRVLEPLGLVEEGAKTAPGKKRPVEQSPQEPDSSSGIGKTGQQPAKKRLNFGQTGDSESVPDPQPLGEPPATPAAVGPTTMASGGGAPMADNNEGADGVGNASGNWHCDSTWLGDRVITTSTRTWALPTYNNHLYKQISSTSTGASNDNHYFGYGTPWGYFDFNRFHCHFSPRDWQRLINNNWGFRPKRLNFKLFNIQVEEVTTNDGVTTIANNLTSTVQVFSDSEYQLPYVLGSAHQGCLPPFPADVFMIPQYGYLTLNNGSQAVGRSSFYCLEYFPSQMLRTGNNFTFSYTFEEVPFHSSYAHSQSLDRLMNPLIDQYLYYLNRTQNQSGSAQNKDLLFSRGSPAGMSVQPKNWLPGPCYRQQRVSKTKTDNNNSNFTWTGASKYNLNGRESIINPGTAVASHKDDEDKFFPMSGVMIFGKESAGASSTALDNVMITDEEEIKATNPVATERFGTVAVNFQSSSTDPATGDVHAMGALPGMVWQDRDVYLQGPIWAKIPHTDGHFHPSPLMGGFGLKNPPPQILIKNTPVPANPPAEFSATKFASFITQYSTGQVSVEIEWELQKENSKRWNPEVQYTSNYAKSANVDFTVDNNGLYTEPRPIGTRYLTRPL

SEQ ID NO: 646 - DNA, 2211 bp, unidentified
  source 1..2211: mol_type = unassigned DNA; note = Adeno-associated virus
atggctgccgatggttatcttccagattggctcgaggacaacctctctgagggcattcgcgagtggtgggacttgaaacctggagccccgaagcccaaagccaaccagcaaaagcaggacgacggccggggtctggtgcttcctggctacaagtacctcggacccttcaacggactcgacaagggggagcccgtcaacgcggcggacgcagcggccctcgagcacgacaaggcctacgaccagcagctcaaagcgggtgacaatccgtacctgcggtataaccacgccgacgccgagtttcaggagcgtctgcaagaagatacgtcttttgggggcaacctcgggcgagcagtcttccaggccaagaagcgggttctcgaacctctcggtctggttgaggaaggcgctaagacggctcctggaaagaaacgtccggtagagcagtcgccacaagagccagactcctcctcgggcatcggcaagacaggccagcagcccgctaaaaagagactcaattttggccagactggcgactcagagtcagtccccgatccacaacctctcggagaacctccagcaacccccgctgctgtgggacctactacaatggcttcaggcggtggcgcaccaatggcagacaataacgaaggcgccgacggagtgggtaatgcctcaggaaattggcattgcgattccacatggctgggcgacagagtcatcaccaccagcacccgcacctgggccttgcccacctacaataaccacctctacaagcaaatctccagtacttcaacgggggccagcaacgacaaccactacttcggctacggcaccccctgggggtattttgatttcaacagattccactgccacttttcaccacgtgactggcagcgactcatcaacaacaattggggattccggcccaagagactcaacttcaaactcttcaacatccaagtcgaggaggtcacgacgaatgatggcgtcacaaccatcgctaataaccttaccagcacggttcaagtcttctcggactcggagtaccagcttccgtacgtcctcggctctgcgcaccagggctgcctccctccgttcccggcggacgtgttcatgattccgcaatacggctacctgacgctcaacaatggcagccaagccgtgggacgttcatccttttactgcctggaatatttcccttctcagatgctgagaacgggcaacaactttaccttcagctacacctttgaggaagtgcctttccacagcagctacgcgcacagccagagcctggaccggctgatgaatcctctcatcgaccaatacctgtattacctgaacagaacacaaaatcagtccggaagtgcccaaaacaaggacttgctgtttagccgtgggtctccagctggcatgtctgttcagcccaaaaactggctacctggaccctgttatcggcagcagcgcgtttctaaaacaaaaacagacaacaacaacagcaattttacctggactggtgcttcaaaatataacctcaatgggcgtgaatccatcatcaaccctggcaccgctgtggcctcacacaaagacgacgaagacaagttctttcccatgagcggtgtcatgatttttggaaaagagagcgccggagcttcaagcactgcattggacaatgtcatgattacagacgaagaggaaattaaagccactaaccctgtggccaccgaaagatttgggaccgtggcagtcaatttccagagcagcagcacagaccctgcgaccggagatgtgcatgctatgggagcattacctggcatggtgtggcaagatagagacgtgtacctgcagggtcccatttgggccaaaattcctcacacagatggacactttcacccgtctcctcttatgggcggctttggactcaagaacccgcctcctcagatcctcatcaaaaacacgcctgttcctgcgaatcctccggcggagttttcagctacaaagtttgcttcattcatcacccaatactccacaggacaagtgagtgtggaaattgaatgggagctgcagaaagaaaacagcaagcgctggaatcccgaagtgcagtacacatccaattatgcaaaatctgccaacgttgattttactgtggacaacaatggactttatactgagcctcgccccattggcacccgttaccttacccgtcccctgtaa

SEQ ID NO: 647 - protein, 737 aa, unidentified
  source 1..737: note = Adeno-associated virus
RMAADGYLPDWLEDNLSEGIREWWDLKPGAPKPKANQQKQDDGRGLVLPGYKYLGPFNGLDKGEPVNAADAAALEHDKAYDQQLKAGDNPYLRYNHADAEFQERLQEDTSFGGNLGRAVFQAKKRVLEPLGLVEEGAKTAPGKKRPVEQSPQEPDSSSGIGKTGQQPAKKRLNFGQTGDSESVPDPQPLGEPPATPAAVGPTTMASGGGAPMADNNEGADGVGNASGNWHCDSTWLGDRVITTSTRTWALPTYNNHLYKQISSTSTGASNDNHYFGYSTPWGYFDFNRFHCHFSPRDWQRLINNNWGFRPKRLNFKLFNIQVEEVTTNDGVTTIANNLTSTVQVFSDSEYQLPYVLGSAHQGCLPPFPADVFMIPQYGYLTLNNGSQAVGRSSFYCLEYFPSQMLRTGNNFTFSYTFEEVPFHSSYAHSQSLDRLMNPLIDQYLYYLNRTQNQSGSAQNKDLLFSRGSPAGMSVQPKNWLPGPCYRQQRVSKTKTDNNNSNFTWTGASKYNLNGRESIINPGTAVASHKDDEDKFFPMSGVMIFGKESAGASSTALDNVMITDEEEIKATNPVATERFGTVAVNFQSSSTDPATGDVHAMGALPGMVWQDRDVYLQGPIWAKIPHTDGHFHPSPLMGGFGLKNPPPQILIKNTPVPANPPAEFSATKFASFITQYSTGQVSVEIEWELQKENSKRWNPEVQYTSNYAKSANVDFTVDNNGLYTEPRPIGTRYLTRPL

SEQ ID NO: 648 - protein, 737 aa, unidentified
  source 1..737: note = Adeno-associated virus
RMAADGYLPDWLEDNLSEGIREWWDLKPGAPKPKANQQKQDDGRGLVLPGYKYLGPFNGLDKGEPVNAADAAALEHDKAYDQQLKAGDNPYLRYNHADAEFQERLQEDTSFGGNLGRAVFQAKKRVLEPLGLVEEGAKTAPGKKRPVEQSPQEPDSSSGIGKTGQQPAKKRLNFGQTGDSESVPDPQPLGEPPATPAAVGPTTMASGGGAPMADNNEGADGVGNASGNWHCDSTWLGDRVITTSTRTWALPTYNNHLYKQISSTSTGASNDNHYFGYSTPWGYFDFNRFHCHFSPRDWQRLINNNWGFRPKRLNFKLFNIQVKEVTTNDGVTTIANNLTSTVQVFSDSEYQLPYVLGSAHQGCLPPFPADVFMIPQYGYLTLNNGSQAVGRSSFYCLEYFPSQMLRTGNNFTFSYTFEEVPFHSSYAHSQSLDRLMNPLIDQYLYYLNRTQNQSGSAQNKDLLFSRGSPAGMSVQPKNWLPGPCYRQQRVSKTKTDNNNSNFTWTGASKYNLNGRESIINPGTAVASHKDDEDKFFPMSGVMIFGKESAGASSTALDNVMITDEEEIKATNPVATERFGTVAVNFQSSSTDPATGDVHAMGALPGMVWQDRDVYLQGPIWAKIPHTDGHFHPSPLMGGFGLKNPPPQILIKNTPVPANPPAEFSATKFASFITQYSTGQVSVEIEWELQKENSKRWNPEVQYTSNYAKSANVDFTVDNNGLYTEPRPIGTRYLTRPL

SEQ ID NO: 649 - protein, 737 aa, unidentified
  source 1..737: note = Adeno-associated virus
RMAADGYLPDWLEDNLSEGIREWWDLKPGAPKPKANQQKQDDGRGLVLPGYKYLGPFNGLDKGEPVNAADAAALEHDKAYDQQLKAGDNPYLRYNHADAEFQERLQEDTSFGGNLGRAVFQAKKRVLEPLGLVEEGAKTAPGKKRPVEQSPQEPDSSSGIGKTGQQPAKKRLNFGQTGDSESVPDPQPLGEPPATPAAVGPTTMASGGGAPMADNNEGADGVGNASGNWHCDSTWLGDRVITTSTRTWALPTYNNHLYKQISSTSTGASNDNHYFGYSTPWGYFDFNRFHCHFSPRDWQRLINNNWGFRPKRLNFKLFNIQVKEVTTNDGVTTIANNLTSTVQVFSDSEYQLPYVLGSAHQGCLPPFPADVFMIPQYGYLTLNNGSQAVGRSSFYCLEYFPSQMLRTGNNFTFSYTFEEVPFHSSYAHSQSLDRLMNPLIDQYLYYLNRTQNQSGSAQNKDLLFSRGSPAGMSVQPKNWLPGPCYRQQRVSKTKTDNNNSNFTWTGASKYNLNGRESIINPGTAVASHKDDEDKFFPMSGVMIFGKESAGANSTALDNVMITDEEEIKATNPVATERFGTVAVNFQSSSTDPATGDVHAMGALPGMVWQDRDVYLQGPIWAKIPHTDGHFHPSPLMGGFGLKNPPPQILIKNTPVPANPPAEFSATKFASFITQYSTGQVSVEIEWELQKENSKRWNPEVQYTSNYAKSANVDFTVDNNGLYTEPRPIGTRYLTRPL

SEQ ID NO: 650 - DNA, 2208 bp, unidentified
  source 1..2208: mol_type = unassigned DNA; note = Adeno-associated virus
atggctgccgatggttatcttccagattggctcaaggacactctctctgaaggaataagacagtggtggaagctcaaacctggcccaccaccaccaaagcccgcagagcggcataaggacgacagcgggggtcttgtgcttcctgggtacaagtacctcggacccttcaacggactcgacaagggagagccggtcaacgaggcagacgccgcggccctcgagtacgacaaggcctacgaccggcagctcgacagcggagacaacccgtacctcaagtacaaccacgccgacgcggagtttcaggagcgccttaaagaagatacgtcttttgggggcaacctcggacgagcagtcttccaggcgaaaaagagggttcttgaacctctgggcctggttgaggaacctgttaagacggctccgggaaaaaagaggccggtagagcactctcctgtggagccagactcctcctcgggaacaggaaaagcgggccagcagcctgcgagaaagagattgaattttggtcagactggagacgcagactccgtacctgacccccagcctctcggacagccaccagcagccccctctggtctgggaactaatacgatggctacaggcagtggcgcaccaatggcagacaataacgagggcgccgacggagtgggtaattcctcgggaagttggcattgcgattccacatggatgggcgacagagtcatcaccaccagcacccgaacctgggctctgcccacctacaacaaccatctgtacaagcagatctccagccaatcaggagccagcaacgacaaccactactttggctacagcaccccttgggggtattttgacttcaacagattccactgccacttttcaccacgtgactggcaaagactcatcaacaacaactggggattccggcccaagagactcaacttcaagctctttaacattcaagtcaaggaggtcacgcagaatgacggtacgacgacgattgccaataaccttaccagcacggttcaggtgtttactgactcggagtaccagctcccgtacgtccccggctcggcgcatcaaggatgcctcccgccgttcccagcagacgtcttcatggtgccacagtatggatacctcaccctgaacaacgggagtcaggcagtaggacgctcttcattttactgcctggagtactttccttctcagatgcttcgtaccggaaacaactttaccttcagctacacctttgaggatgttcctttccacagcagctacgctcacagccagagtttggaccgtctcatgaatcctctcatcgaccagtacctgtattacttgagcagaacaaacactccaagcggaaccaccacgcagtccaggcttcagttttctcaggccggagcaagtgacattcgggaccagtctaggaactggcttcctggaccctgttaccgccagcagcgagtatcaaagacagctgcggacaacaacaacagtgaatactcgtggactggagctaccaagtaccacctcaatggcagagactctctggtgaatccgggcccggccatggccagccacaaggacgatgaagaaaagttttttcctcaaagcggggttctcatctttgggaagcaaggctcagagaaaacaaatgtggacattgaaaaggtcatgattacagacgaagaggaaatcagaaccaccaatcccgtggccacggagcagtatggttctgtatctaccaacctccagagcggcaacacacaagcagctactgcagatgtcaacacacaaggcgttcttccaggcatggtctggcaggacagagacgtgcacctgcaggggcctatctgggcaaagattccacacacggacggacattttcacccctctcccctcatgggcggatttggacttaaacaccctcctccacagattctcatcaagaacaccccggtacctgcaaatccttcgaccaccttcagtgcggcaaagtttgcttccttcatcacacagtattccacagggcaggtcagcgtggagatcgagtgggagctgcagaaggagaacagcaaacgctggaaccccgagatccagtacacttccaactacaacaaatctgttaatgtggactttactgtggacactaatggtgtgtattcagagcctcgccccattggcaccagatacctgactcgtaatctgtaa

SEQ ID NO: 651 - protein, 735 aa, unidentified
  source 1..735: note = Adeno-associated virus
MAADGYLPDWLKDTLSEGIRQWWKLKPGPPPPKPAERHKDDSGGLVLPGYKYLGPFNGLDKGEPVNEADAAALEYDKAYDRQLDSGDNPYLKYNHADAEFQERLKEDTSFGGNLGRAVFQAKKRVLEPLGLVEEPVKTAPGKKRPVEHSPVEPDSSSGTGKAGQQPARKRLNFGQTGDADSVPDPQPLGQPPAAPSGLGTNTMATGSGAPMADNNEGADGVGNSSGSWHCDSTWMGDRVITTSTRTWALPTYNNHLYKQISSQSGASNDNHYFGYSTPWGYFDFNRFHCHFSPRDWQRLINNNWGFRPKRLNFKLFNIQVKEVTQNDGTTTIANNLTSTVQVFTDSEYQLPYVPGSAHQGCLPPFPADVFMVPQYGYLTLNNGSQAVGRSSFYCLEYFPSQMLRTGNNFTFSYTFEDVPFHSSYAHSQSLDRLMNPLIDQYLYYLSRTNTPSGTTTQSRLQFSQAGASDIRDQSRNWLPGPCYRQQRVSKTAADNNNSEYSWTGATKYHLNGRDSLVNPGPAMASHKDDEEKFFPQSGVLIFGKQGSEKTNVDIEKVMITDEEEIRTTNPVATEQYGSVSTNLQSGNTQAATADVNTQGVLPGMVWQDRDVHLQGPIWAKIPHTDGHFHPSPLMGGFGLKHPPPQILIKNTPVPANPSTTFSAAKFASFITQYSTGQVSVEIEWELQKENSKRWNPEIQYTSNYNKSVNVDFTVDTNGVYSEPRPIGTRYLTRNL

SEQ ID NO: 652 - DNA, 2208 bp, unidentified
  source 1..2208: mol_type = unassigned DNA; note = Adeno-associated virus
atggctgccgatggttatcttccagattggctcgaggacactctctctgaaggaataagacagtggtggaagctcaaacctggcccaccaccaccaaagcccgcagagcggcataaggacgacagcaggggtcttgtgcttcctgggtacaagtacctcggacccttcaacggactcgacaagggggagccggtcaacgaggcagacgccgcggccctcgagcacgacaaggcctacgaccggcagctcgacagcggagacaacccgtacctcaagtacaaccacgccgacgcagagtttcaggagcgccttaaagaagatacgtcttttgggggcaacctcggacgagcagtcttccaggcgaaaaagagggttcttgaacctctgggcctggttgaggaacctgttaagacggctccgggaaaaaagaggccggtagagcactctcctgtggagccagactcctcctcgggaaccggaaaagcgggccagcagcctgcaagaaaaagattaaattttggtcagactggagacgcagactccgtacctgacccccagcctctcggacagccaccagcagccccctctggtctgggatctactacaatggctacaggcagtggcgcaccaatggcagacaataacgagggtgccgatggagtgggtaattcctcaggaaattggcattgcgattcccaatggctgggcgacagagtcatcaccaccagcacccgaacctgggccctgcccacatacaacaaccacctctacaagcaaatctccagccaatcaggagccagcaacgacaaccactactttggctacagcaccccctgggggtattttgacttcaacagattccactgccacttttcaccacgtgactggcaaagactcatcaacaacaactggggattccggcccaaaagactcaacttcaagctctttaatattcaagtcaaagaggtcacgcagaatgacggtacgacgacgattgccaataaccttaccagcacggttcaggtgtttactgactcggagtaccagctcccgtacgtcctgggctcggcgcatcaaggatgcctcccgccgtttccagcggacgtcttcatggtcccacagtatggatacctcaccctgaacaacgggagtcaggcggtaggacgctcttccttttactgcctggagtactttccttctcagatgctgcgtactggaaacaactttcagttcagctacacttttgaagacgtgcctttccacagcagctacgctcacagccagagtctggatcggctgatgaatcctctgatcgaccagtacctgtattatctgaacaagacacaaacaaatagtggaactcttcagcagtctcggctactgtttagccaagctggaccaaccaacatgtctcttcaagctaaaaactggctgcctggaccttgctacagacagcagcgtctgtcaaaacaggcaaacgacaacaacaacagcaactttccctggactgcagctacaaagtatcatctaaatggccgggactcgttggttaatccaggaccagctatggccagtcgcaaggatgacgaagaaaagtttttccccatgcatggaaccctgatatttggtaaacaaggaacaaatgccaacgacgcggatttggaaaatgtcatgattacagatgaagaagaaatcagggccaccaatcccgtggctacggagcagtacgggactgtgtcaaataatttgcaaaactcaaacactggtccaactactggaactgtcaatcaccaaggagcgttacctggtatggtgtggcaggatcgagacgtgtacctgcagggacccatttgggccaagattcctcacaccgatggacactttcatccttctccactgatgggaggttttggactcaaacacccgcctcctcagatcatgatcaaaaacactcccgttccagccaatcctcccacaaacttcagttctgccaagtttgcttctttcatcacacagtattccacgggacaggtcagcgtggagatcgagtgggagctgcagaaggagaacagcaaacgctggaatcccgaaattcagtacacttccaactacaacaagtctgttaatgtggactttactgtggacactaatggtgtgtattcagagcctcgccccattggcaccagatacctgactcgtaatctgtaa

SEQ ID NO: 653 - protein, 735 aa, unidentified
  source 1..735: note = Adeno-associated virus
MAADGYLPDWLEDTLSEGIRQWWKLKPGPPPPKPAERHKDDSRGLVLPGYKYLGPFNGLDKGEPVNEADAAALEHDKAYDRQLDSGDNPYLKYNHADAEFQERLKEDTSFGGNLGRAVFQAKKRVLEPLGLVEEPVKTAPGKKRPVEHSPVEPDSSSGTGKAGQQPARKRLNFGQTGDADSVPDPQPLGQPPAAPSGLGSTTMATGSGAPMADNNEGADGVGNSSGNWHCDSQWLGDRVITTSTRTWALPTYNNHLYKQISSQSGASNDNHYFGYSTPWGYFDFNRFHCHFSPRDWQRLINNNWGFRPKRLNFKLFNIQVKEVTQNDGTTTIANNLTSTVQVFTDSEYQLPYVLGSAHQGCLPPFPADVFMVPQYGYLTLNNGSQAVGRSSFYCLEYFPSQMLRTGNNFQFSYTFEDVPFHSSYAHSQSLDRLMNPLIDQYLYYLNKTQTNSGTLQQSRLLFSQAGPTNMSLQAKNWLPGPCYRQQRLSKQANDNNNSNFPWTAATKYHLNGRDSLVNPGPAMASRKDDEEKFFPMHGTLIFGKQGTNANDADLENVMITDEEEIRATNPVATEQYGTVSNNLQNSNTGPTTGTVNHQGALPGMVWQDRDVYLQGPIWAKIPHTDGHFHPSPLMGGFGLKHPPPQIMIKNTPVPANPPTNFSSAKFASFITQYSTGQVSVEIEWELQKENSKRWNPEIQYTSNYNKSVNVDFTVDTNGVYSEPRPIGTRYLTRNL

SEQ ID NO: 654 - DNA, 2208 bp, unidentified
  source 1..2208: mol_type = unassigned DNA; note = Adeno-associated virus
atggctgccgatggttatcttccagattggctcgaggacactctctctgaaggaataagacagtggtggaagctcaaacctggcccaccaccaccaaagcccgcagagcggcataaggacgacagcaggggtcttgtgcttcctgggtacaagtacctcggacccttcaacggactcgacaagggagagccggtcaacgaggcagacgccgcggccctcgagcacgacaaagcctacgaccggcagctcgacagcggagacaacccgtacctcaagtacaaccacgccgacgcggagtttcaggagcgccttaaagaagatacgtcttttgggggcaacctcggacgagcagtcttccaggcgaaaaagagggttcttgaacctctgggcctggttggggaacctgtcaagacggctccaggaaaaaagaggccggtagagcactctcctgtggagccagactcctcctcgggaaccggaaaggcgggccagcagcctgcaagaaaaagattgaattttggtcagactggagacgcagactcagtacctgacccccagcctctcggacagccaccagcagccccctctggtctgggaactaatacgatggctacaggcagtggcgcaccaatggcagacaataacgagggcgccgacggagtgggtaattcctcgggaaattggcattgcgattccacatggatgggcgacagagtcatcaccaccagcacccgaacctgggccctgcccacctacaacaaccacctctacaaacaaatttccagccaatcaggagcctcgaacgacaatcactactttggctacagcaccccttgggggtattttgacttcaacagattccactgccacttttcaccacgtgactggcaaagactcatcaacaacaactggggattccgacccaagagactcaacttcaagctctttaacattcaagtcaaagaggtcacgcagaatgacggtacgacgacgattgccaataaccttaccagcacggttcaggtgtttactgactcggagtaccagctcccgtacgtcctcggctcggcgcatcaaggatgcctcccgccgttcccagcagacgtcttcatggtgccacagtatggatacctcaccctgaacaacgggagtcaggcagtaggacgctcttcattttactgcctggagtactttccttctcagatgctgcgtaccggaaacaactttaccttcagctacacttttgaggacgttcctttccacagcggctacgctcacagccagagtctggaccgtctcatgaatcctctcatcgaccagtacctgtattacttgagcacaacaaacactccaagtggaaccaccacgcagtcaaggcttcagttttctcaggccggagcgagtgacattcgggaccagtctaggaactggcttcctggaccctgttaccgccagcagcgagtatcaaagacatctgcggataacaacaacagtgaatactcgtggactggagctaccaagtaccacctcaatggcagagactctctggtgaatccgggcccggccatggcaagccacaaggacaatgaagaaaagttttttcctcagagcggggttctcatctttgggaagcaaggctcagagaaaacaaatgtggacattgaaaaggtcatgattacagacgaagaggaaatcaggacaaccaatcccgtggctacggagcagtacggttctgtatctaccaacctccagagaggcaacagacaagcagctaccgcagatgtcaacacacaaggcgttcttccaggcatggtctggcaggacagagatgtgtaccttcaggggcccatctgggcaaagattccacacacggacggacattttcacccctctcccctcatgggtggattcggacttaaacaccctcctccacagattctcatcaagaacaccccggtacctgcgaatccttcgaccaccttcagtgcggcaaagtttgcttccttcatcacacagtactccacgggacaggtcagcgtggagatcgagtgggagctgcagaaggaaaacagcaaacgctggaatcccgaaattcagtacacttccaactacaacaagtctgttaatgtggactttactgtggacactaatggcgtgtattcagagcctcgccccattggcaccagatacctgactcgtaatctgtaa

SEQ ID NO: 655 - protein, 735 aa, unidentified
  source 1..735: note = Adeno-associated virus
MAADGYLPDWLEDTLSEGIRQWWKLKPGPPPPKPAERHKDDSRGLVLPGYKYLGPFNGLDKGEPVNEADAAALEHDKAYDRQLDSGDNPYLKYNHADAEFQERLKEDTSFGGNLGRAVFQAKKRVLEPLGLVGEPVKTAPGKKRPVEHSPVEPDSSSGTGKAGQQPARKRLNFGQTGDADSVPDPQPLGQPPAAPSGLGTNTMATGSGAPMADNNEGADGVGNSSGNWHCDSTWMGDRVITTSTRTWALPTYNNHLYKQISSQSGASNDNHYFGYSTPWGYFDFNRFHCHFSPRDWQRLINNNWGFRPKRLNFKLFNIQVKEVTQNDGTTTIANNLTSTVQVFTDSEYQLPYVLGSAHQGCLPPFPADVFMVPQYGYLTLNNGSQAVGRSSFYCLEYFPSQMLRTGNNFTFSYTFEDVPFHSGYAHSQSLDRLMNPLIDQYLYYLSTTNTPSGTTTQSRLQFSQAGASDIRDQSRNWLPGPCYRQQRVSKTSADNNNSEYSWTGATKYHLNGRDSLVNPGPAMASHKDNEEKFFPQSGVLIFGKQGSEKTNVDIEKVMITDEEEIRTTNPVATEQYGSVSTNLQRGNRQAATADVNTQGVLPGMVWQDRDVYLQGPIWAKIPHTDGHFHPSPLMGGFGLKHPPPQILIKNTPVPANPSTTFSAAKFASFITQYSTGQVSVEIEWELQKENSKRWNPEIQYTSNYNKSVNVDFTVDTNGVYSEPRPIGTRYLTRNL

SEQ ID NO: 656 - DNA, 2208 bp, unidentified
  source 1..2208: mol_type = unassigned DNA; note = Adeno-associated virus
atggctgccgatggttatcttccagattggctcgaggacactctctctgaaggaataagacagtggtggaagctcaaacctggcccaccaccaccaaagcccgcagagcggcataaggacgacagcaggggtcttgtgcttcctgggtacaagtacctcggacccttcaacggactcgacaagggagagccggtcaacgaggcagacgccgcggccctcgagcacgacaaagcctacgaccggcagctcgacagcggagacaacccgtacctcaagtacaaccacgccgacgcggagtttcaggagcgccttaaagaagatacgtcttttgggggcaacctcggacgagcagtcttccaggcgaaaaagagggttcttgaacctctgggcctggttggggaacctgttaagacggctccgggaaaaaagaggccggtagagcactctcctgtggagccagactcctcctcgggaaccggaaaggcgggccagcagcctgcaagaaaaagattgaattttggtcagactggagacgcagactcagtacctgacccccagcctctcggacagccaccagcagccccctctggtctgggaactaatacgatggctacaggcagtggcgcaccaatggcagacaataacgagggcgccgacggagtgggtaattcctcgggaaatcggcattgcgattccacatggatgggcgacagagtcatcaccaccagcacccgaacctgggccctgcccacctacaacaaccacctctacagacaaatttccagccaatcaggagcctcgaacgacaatcactactttggctacagcaccccttgggggtattttgacttcaacagattccactgccacttttcaccacgtgactggcaaagactcatcaacaacaactggggattccgacccaagagactcaacttcaagctctttaacattcaagtcaaagaggtcacgcagaatgacggtacgacgacgattgccaataaccttaccagcacggttcaggtgtttactgactcggagtaccagctcccgtacgtcctcggctcggcgcatcaaggatgcctcccgccgttcccagcagacgtcttcatggtgccacagtatggatacctcaccctgagcaacgggagtcaggcagtaggacgctcttcattttactgcccggagtactttccttctcagatgctgcgtaccggaaacaactttaccttcagctacacttttgaggacgttcctttccacagcagctacgctcacagccagagtctggaccgtctcatgaatcctctcatcgaccagtacctgtattacttgagcacaacaaacactccaagtggaaccaccacgcagtcaaggcttcagttttctcaggccggagcgagtgacattcgggaccagtctaggaactggcttcctggaccctgttaccgccagcagcgagtatcaaagacatctgcggataacaacaacagtgaatactcgtggactggagctaccaagtaccacctcaatggcagagactctctggtgaatccgggcccggccatggcaagccacaaggacaatgaagaaaagttttttcctcagagcggggttctcatctttgggaagcaaggctcagagaaaacaaatgtggacattgaaaaggtcatgattacagacgaagaggaaatcaggacaaccaatcccgtggctacggagcagtatggttctgtatctaccaacctccagagaggcaacagacaagcagctaccgcagatgtcaacacacaaggcgttcttccaggcatggtctggcaggacagagatgtgtaccttcaggggcccatctgggcaaagattccacacacggacggacattttcacccctctcccctcatgggtggattcggacctaaacaccctcctccacagattctcatcaagaacaccccggtacctgcgaatccttcgaccaccttcagtgcggcaaagtttgcttccttcatcacacagtactccacgggacaggtcagcgtggagatcgagtgggagctgcagaaggaaaacagcaaacgctggaatcccgaaattcagtacacttccaactacaacaagtctgttaatgtggactttactgtggacactaatggcgtgtattcagagcctcgccccattggcaccagatacctgactcgtaatttgtaa

SEQ ID NO: 657 - protein, 735 aa, unidentified
  source 1..735: note = Adeno-associated virus
MAADGYLPDWLEDTLSEGIRQWWKLKPGPPPPKPAERHKDDSRGLVLPGYKYLGPFNGLDKGEPVNEADAAALEHDKAYDRQLDSGDNPYLKYNHADAEFQERLKEDTSFGGNLGRAVFQAKKRVLEPLGLVGEPVKTAPGKKRPVEHSPVEPDSSSGTGKAGQQPARKRLNFGQTGDADSVPDPQPLGQPPAAPSGLGTNTMATGSGAPMADNNEGADGVGNSSGNRHCDSTWMGDRVITTSTRTWALPTYNNHLYRQISSQSGASNDNHYFGYSTPWGYFDFNRFHCHFSPRDWQRLINNNWGFRPKRLNFKLFNIQVKEVTQNDGTTTIANNLTSTVQVFTDSEYQLPYVLGSAHQGCLPPFPADVFMVPQYGYLTLSNGSQAVGRSSFYCPEYFPSQMLRTGNNFTFSYTFEDVPFHSSYAHSQSLDRLMNPLIDQYLYYLSTTNTPSGTTTQSRLQFSQAGASDIRDQSRNWLPGPCYRQQRVSKTSADNNNSEYSWTGATKYHLNGRDSLVNPGPAMASHKDNEEKFFPQSGVLIFGKQGSEKTNVDIEKVMITDEEEIRTTNPVATEQYGSVSTNLQRGNRQAATADVNTQGVLPGMVWQDRDVYLQGPIWAKIPHTDGHFHPSPLMGGFGPKHPPPQILIKNTPVPANPSTTFSAAKFASFITQYSTGQVSVEIEWELQKENSKRWNPEIQYTSNYNKSVNVDFTVDTNGVYSEPRPIGTRYLTRNL

SEQ ID NO: 658 - DNA, 2205 bp, unidentified
  source 1..2205: mol_type = unassigned DNA; note = Adeno-associated virus
atggctgccgatggttatcttccagattggctcgaggacactctctctgaaggaataagacagtggtggaagctcaaacctggcccaccaccaccaaagcccgcagagcggcataaggacgacagcaggggtcttgtgcttcctgggtacaagtacctcggacccttcaacggactcgacaagggagagccggtcaacgaggcagacgccgcggccctcgagcacgacaaggcctacgaccggcagctcgacagcggagacaacccgtacctcaagtacaaccacgccgacgcggagtttcaggagcgtcttaaagaagatacgtcttttgggggcaacctcggacgagcagtcttccaggcgaaaaagagggttcttgaacctctgggcctggttgaggaacctgttaagacggctccgggaaaaaagaggccggtagagcactctcctgcggagccagactcctcctcgggaaccggaaaagcgggccagcagcctgcaagaaaaagactgaatttcggtcagactggagacgcagactccgtacctgacccccagcctctcagacagccaccagcagcccccacaagtttgggatctactacaatggctacaggcagtggcgcaccaatggcagacaataacgagggtgccgatggagtgggtaattcctcaggaaattggcattgcgattcccaatggctgggcgacagagtcatcaccaccagcacccgaacctgggccctgcccacctacaacaaccacctttacaagcaaatctccagccaatcaggagcctcaaacgacaaccactactttggctacagcaccccctgggggtattttgacttcaacagattccactgccacttttcaccacgtgactggcaaagactcatcaacaacaactggggattccgacccaagagactcaacttcaagctctttaacattcaagtcaaagaggtcacgcagaatgacggtacgacgacgattgccaataaccttaccagcacggttcaggtgtttactgactcggagtaccagctcccgtacgtcctcggctcggcgcatcaaggatgcctcccgccgtttccagcggacgtcttcatggtcccacagtatggatacctcaccctgaacaacgggagtcaggcggtaggacgctcttccttttactgcctggagtactttccttctcagatgctgcgtactggaaacaactttcagttcagctacacttttgaagacgtgcctttccacagcagctacgctcacagccagagtttggatcggctgatgaatcctctgatcgaccagtacctgtattatctaaacagaacacaaacagctagtggaactcagcagtctcggctactgtttagccaagctggacccacaagcatgtctcttcaagctaaaaactggctgcctggaccgtgttatcgccagcagcgtttgtcaaagcaggcaaacgacaacaacaacagcaactttccctggactggagctaccaagtactacctcaatggcagagactctttggtgaacccgggcccggccatggccagccacaaggacgatgaagaaaagtttttccccatgcatggaaccctaatatttggtaaagaaggaacaaatgctaccaacgcggaattggaaaatgtcatgattacagatgaagaggaaatcaggaccaccaatcccgtggctacagagcagtacggatatgtgtcaaataatttgcaaaactcaaatactgctgcaagtactgaaactgtgaatcaccaaggagcattacctggtatggtgtggcaggatcgagacgtgtacctgcagggacccatttgggccaagattcctcacaccgatggacactttcatccttctccactgatgggaggttttggactcaaacacccgcctcctcagattatgatcaaaaacactcccgttccagccaatcctcccacaaacttcagttctgccaagtttgcttccttcatcacacagtattccacgggacaggtcagcgtggagatcgagtgggagctgcagaaggagaacagcaaacgctggaatcccgaaattcagtacacttccaactacaacaaatctgttaatgtggactttactgtggacactaatggtgtgtattcagagcctcgccccattggcaccagatacctgactcgtaatctgtaa

SEQ ID NO: 659 - protein, 734 aa, unidentified
  source 1..734: note = Adeno-associated virus
MAADGYLPDWLEDTLSEGIRQWWKLKPGPPPPKPAERHKDDSRGLVLPGYKYLGPFNGLDKGEPVNEADAAALEHDKAYDRQLDSGDNPYLKYNHADAEFQERLKEDTSFGGNLGRAVFQAKKRVLEPLGLVEEPVKTAPGKKRPVEHSPAEPDSSSGTGKAGQQPARKRLNFGQTGDADSVPDPQPLRQPPAAPTSLGSTTMATGSGAPMADNNEGADGVGNSSGNWHCDSQWLGDRVITTSTRTWALPTYNNHLYKQISSQSGASNDNHYFGYSTPWGYFDFNRFHCHFSPRDWQRLINNNWGFRPKRLNFKLFNIQVKEVTQNDGTTTIANNLTSTVQVFTDSEYQLPYVLGSAHQGCLPPFPADVFMVPQYGYLTLNNGSQAVGRSSFYCLEYFPSQMLRTGNNFQFSYTFEDVPFHSSYAHSQSLDRLMNPLIDQYLYYLNRTQTASGTQQSRLLFSQAGPTSMSLQAKNWLPGPCYRQQRLSKQANDNNNSNFPWTGATKYYLNGRDSLVNPGPAMASHKDDEEKFFPMHGTLIFGKEGTNATNAELENVMITDEEEIRTTNPVATEQYGYVSNNLQNSNTAASTETVNHQGALPGMVWQDRDVYLQGPIWAKIPHTDGHFHPSPLMGGFGLKHPPPQIMIKNTPVPANPPTNFSSAKFASFITQYSTGQVSVEIEWELQKENSKRWNPEIQYTSNYNKSVNVDFTVDTNGVYSEPRPIGTRYLTRNL

SEQ ID NO: 660 - DNA, 3160 bp, unidentified
  source 1..3160: mol_type = unassigned DNA; note = Adeno-associated virus
acccttcactaaagggactagtcctgcaggtttaaacgaattcgcccttgctgcgtcaactggaccaatgagaactttcccttcaacgactgtgtcgacaagatggtgatttggtgggaggaggggaagatgaccgccaaggtcgtggagtcggccaaagccattctcggaggaagcaaggtgcgcgtggaccagaaatgcaagtcctcggcccagatagatccgactcccgtgatcgtcacctccaacaccaacatgtgcgccgtgattgacgggaactcaacgaccttcgaacaccagcagccgttgcaagaccggatgttcaaatttgaactcacccgccgtctggatcatgactttgggaaggtcaccaagcgggaagtcaaagactttttccggtgggcaaaggatcacgtggttgaggtggagcatgaattctacgtcaaaaagggtggagccaagaaaagacccgcccctagtgacgcagatataagtgagcccaaacgggtgcgcgagtcagttgcgcagccatcgacgtcagacgcggaagcttcgatcaactacgcggacaggtaccaaaacaaatgttctcgtcacgtgggcatgaatctgatgctgtttccctgcagacaatgcgagagaatgaatcaaaattcaaatatctgcttcactcacggacagaaagactgtttagagtgctttcccgtgtcagaatctcaacctgtttctgtcgtcaaaaaggcgtatcagaaactgtgctacattcatcatatcatgggaaaggtgccagacgcttgcactgcctgcgatctggtcaatgtggatttggatgactgcatctctgaacaataaatgatttaaatcaggtatggctgccgatggttatcttccagattggctcgaggacactctctctgaaggaataagacagtggtggaagctcaaacctggcccaccaccaccaaagcccgcagagcggcataaggacgacagcaggggtcttgtgcttcctgggtacaagtacctcggacccttcaacggactcgacaagggagagccggtcaacgaggcagacgccgcggccctcgagcacgacaaggcctacgaccggcagctcgacagcggagacaacccgtacctcaagtacaaccacgccgacgcggagtttcaggagcgtcttaaagaagatacgtcttttgggggcaacctcggacgagcagtcttccaggcgaaaaagagggttcttgaacctctgggcctggttgaggaacctgttaagacggctccgggaaaaaagaggccggtagagcactctcctgcggagccagactcctcctcgggaaccggaaaagcgggccagcagcctgcaagaaaaagactgaatttcggtcagactggagacgcagactccgtacctgacccccagcctctcagacagccaccagcagcccccacaagtttgggatctactacaatggctacaggcagtggcgcaccaatggcagacaataacgagggtgccgatggagtgggtaattcctcaggaaattggcattgcgattcccaatggctgggcgacagagtcatcaccaccagcacccgaacctgggccctgcccacctacaacaaccacctttacaagcaaatctccagccaatcaggagcctcaaacgacaaccactactttggctacagcaccccctgggggtattttgacttcaacagattccactgccacttttcaccacgtgactggcaaagactcatcaacaacaactggggattccgacccaagagactcaacttcaagctctttaacattcaagtcaaagaggtcacgcagaatgacggtacgacgacgattgccaataaccttaccagcacggttcaggtgtttactgactcggagtaccagctcccgtacgtcctcggctcggcgcatcaaggatgcctcccgccgtttccagcggacgtcttcatggtcccacagtatggatacctcaccctgaacaacgggagtcaggcggtaggacgctcttccttttactgcctggagtactttccttctcagatgctgcgtactggaaacaactttcagttcagctacacttttgaagacgtgcctttccacagcagctacgctcacagccagagtttggatcggctgatgaatcctctgatcgaccagtacctgtattatctaaacagaacacaaacagctagtggaactcagcagtctcggctactgtttagccaagctggacccacaagcatgtctcttcaagctaaaaactggctgcctggaccgtgttatcgccagcagcgtttgtcaaagcaggcaaacgacaacaacaacagcaactttccctggactggagctaccaagtactacctcaatggcagagactctttggtgaacccgggcccggccatggccagccacaaggacgatgaagaaaagtttttccccatgcatggaaccctaatatttggtaaagaaggaacaaatgctaccaacgcggaattggaaaatgtcatgattacagatgaagaggaaatcaggaccaccaatcccgtggctacagagcagtacggatatgtgtcaaataatttgcaaaactcaaatactgctgcaagtactgaaactgtgaatcaccaaggagcattacctggtatggtgtggcaggatcgagacgtgtacctgcagggacccatttgggccaagattcctcacaccgatggacactttcatccttctccactgatgggaggttttggactcaaacacccgcctcctcagattatgatcaaaaacactcccgttccagccaatcctcccacaaacttcagttctgccaagtttgcttccttcatcacacagtattccacgggacaggtcagcgtggagatcgagtgggagctgcagaaggagaacagcaaacgctggaatcccgaaattcagtacacttccaactacaacaaatctgttaatgtggactttactgtggacactaatggtgtgtattcagagcctcgccccattggcaccagatacctgactcgtaatctgtaattgcttgttaatcaataaaccgtttaattcgtttcagttgaactttggtctctgcgaagggcgaattcgcggccgctaaatcaatcg

SEQ ID NO: 661 - protein, 734 aa, unidentified
  source 1..734: note = Adeno-associated virus
MAADGYLPDWLEDTLSEGIRQWWKLKPGPPPPKPAERHKDDSRGLVLPGYKYLGPFNGLDKGEPVNEADAAALEHDKAYDRQLDSGDNPYLKYNHADAEFQERLKEDTSFGGNLGRAVFQAKKRVLEPLGLVEEPVKTAPGKKRPVEHSPAEPDSSSGTGKAGQQPARKRLNFGQTGDADSVPDPQPLGQPPAAPTSLGSTTMATGSGAPMADNNEGADGVGNSSGNWHCDSQWLGDRVITTSTRTWALPTYNNHLYKQISSQSGASNDNHYFGYSTPWGYFDFNRFHCRFSPRDWQRLINNNWGFRPKRLNFKLFNIQVKEVTQNDGTTTIANNLTSTVQVFTDSEYQLPYVLGSAHQGCLPPFPADVFMVPQYGYLTLNNGSQAVGRSSFYCLEYFPSQMLRTGNNFQFSYTFEDVPFHSSYAHSQGLDRLMNPLIDQYLYYLNRTQTASGTQQSRLLFSQAGPTSMSLQAKNWLPGPCYRQQRLSKQANDNNNSNFPWTGATKYHLNGGDSLVNPGPAMASHKDDEEKFFPMHGTLIFGKEGTNATNAELENVMITDEEEIRTTNPVATEQYGYVSNNLQNSNTAASTETVNHQGALPGMVWQDRDVYLRGPIWAKIPHADGHFHPSPLMGGFGLKHPPPQIMIKNTPVPANPPTNFSSAKFASFITQYSTGQVSVEIEWELQKENSKRWNPEIQYTSNYNKSVNVDFTVDTNGVYSEPRPIGTRYLTRNL

SEQ ID NO: 662 - DNA, 3157 bp, unidentified
  source 1..3157: mol_type = unassigned DNA; note = Adeno-associated virus
ctcactaagggactagtcctgcaggtttaaacgaattcgcccttgctgcgtcaactggaccaatgagaactttcccttcaacgactgtgtcgacaagatggtgatttggtgggaggaggggaagatgaccgccaaggtcgtggagtcggccaaagccactctcggaggaagcaaggtgcgcgtggaccagaaacgcaagtcctcggcccagatagatccgactcccgtgatcgtcacctccaacaccaacatgtgcgccgtgattgacgggaactcaacgaccttcgaacaccagcagccgttgcaagaccgaatgttcaaatttgaactcacccgccgtctggatcatgacttcgggaaggtcaccaagcaggaagtcaaagactttttccggtgggcaaaggatcacgtggttgaggtggagcatgaattctacgtcaaaaagggtggagccaagaaaagacccgcccctagtgacgcagatataagtgagcccaaacgggtgcgcgagtcagttgcgcagccatcgacgtcagacgcggaagcttcgatcaactacgcggacaggtaccaaaacaaatgttctcgtcacgtgggcatgaatctgatgctgtttccctgcagacaatgcgagagaatgaatcaaaattcaaatatctgcttcactcacggacagaaagactgtttagagtgctttcccgtgtcagaatctcaacctgtttctgtcgtcaaaaaggcgtatcagaaactgtgctacattcatcatatcatgggaaaggtgccagacgcttgcactgcctgcgatctggtcaatgtggatttggatgactgcatctctgaacaataaatgatttaaatcaggtatggctgccgatggttatcttccagattggctcgaggacactctctctgaaggaataagacagtggtggaagctcaaacctggcccaccaccaccaaagcccgcagagcggcataaggacgacagcaggggtcttgtgcttcctgggtacaagtacctcggacccttcaacggactcgacaagggagagccggtcaacgaggcagacgccgcggctctcgagcacgacaaggcctacgaccggcagctcgacagcggagacaacccgtacctcaagtacaaccacgccgacgcggagtttcaggagcgtcttaaagaagatacgtcttttgggggcaacctcggacgagcagtcttccaggcgaaaaagagggttcttgaacctctgggcctggttgaggaacctgttaagacggctccgggaaaaaagaggccggtagagcactctcctgcggagccagactcctcctcgggaaccggaaaagcgggccagcagcctgcaagaaaaagactgaatttcggtcagactggagacgcagactccgtacctgacccccagcctctcggacagccaccagcagcccccacaagtttgggatctactacaatggctacaggcagtggcgcaccaatggcagacaataacgagggtgccgatggagtgggtaattcctcaggaaattggcattgcgattcccaatggctgggcgacagagtcatcaccaccagcacccgaacctgggccctgcccacctacaacaaccacctttacaagcaaatctccagccaatcaggagcctcaaacgacaaccactactttggctacagcaccccctgggggtattttgacttcaacagattccactgccgcttttcaccacgtgactggcaaagactcatcaacaacaactggggattccgacccaagagactcaacttcaagctctttaacattcaagtcaaagaggtcacgcagaatgacggtacgacgacgattgccaataaccttaccagcacggttcaggtgtttactgactcggagtaccagctcccgtacgtcctcggctcggcgcatcaaggatgcctcccgccgtttccagcggacgtcttcatggtcccacagtatggatacctcaccctgaacaacgggagtcaggcggtaggacgctcttccttttactgcctggagtactttccttctcagatgctgcgtactggaaacaactttcagttcagctacacttttgaagacgtgcctttccacagcagctacgctcacagccagggtttggatcggctgatgaatcctctgatcgaccagtacctgtattatctaaacagaacacaaacagctagtggaactcagcagtctcggctactgtttagccaagctggacccacaagcatgtctcttcaagctaaaaactggctgcctggaccgtgttatcgccagcagcgtttgtcaaagcaggcaaacgacaacaacaacagcaactttccctggactggagctaccaagtaccacctcaatggcggagactctttggtgaacccgggcccggccatggccagccacaaggacgatgaagaaaagtttttccccatgcatggaaccctaatatttggtaaagaaggaacaaatgctaccaacgcggaattggaaaatgtcatgattacagatgaagaggaaatcaggaccaccaatcccgtggctacagagcagtacggatatgtgtcaaataatttgcaaaactcaaatactgctgcaagtactgaaactgtgaatcaccaaggagcattacctggtatggtgtggcaggatcgagacgtgtacctgcggggacccatttgggccaagattcctcacgccgatggacactttcatccttctccactgatgggaggttttggactcaaacacccgcctcctcagattatgatcaaaaacactcccgttccagccaatcctcccacaaacttcagttctgccaagtttgcttccttcatcacacagtattccacgggacaggtcagcgtggagatcgagtgggagctgcagaaggagaacagcaaacgctggaatcccgaaattcagtacacttccaactacaacaaatctgttaatgtggactttactgtggacactaatggtgtgtattcagagcctcgccccattggcaccagatacctgactcgtaatctgtaattgcttgttaatcaataaaccgtttaattcgtttcagttgaactttggtctctgcgaagggcgaattcgcggccgctaaattcaattcg

SEQ ID NO: 663 - protein, 734 aa, unidentified
  source 1..734: note = Adeno-associated virus
MAADGYLPDWLEDTLSEGIRQWWKLKPGPPPPKPAERHKDDSRGLVLPGYKYLGPFNGLDKGEPVNEADAAALEHDKAYDRQLDSGDNPYLKYNHADAEFQERLKEDTSFGGNLGRAVFQAKKRVLEPLGLVEEPVKTAPGKKRPVEHSPAEPDSSSGTGKAGQQPARKRLNFGQTGDADSVPDPQPLGQPPAAPTSLGSTTMATGSGAPMADNNEGADGVGNSSGNWHCDSQWLGDRVITTSTRTWALPTYNNHLYKQISSQSGASNDNHYFGYSTPWGYFDFNRFHCHFSPRDWQRLINNNWGFRPKRLNFKLFNIQVKEVTQNDGTTTIANNLTSTVQVFTDSEYQLPYVLGSAHQGCLPPFPADVFMVPQYGYLTLNNGSQAVGRSSFYCLECFPSQMLRTGNNFQFSYTFEDVPFHSSYAHSQSLDRLMNPLIDQYLYYLNRTQTASGTQQSRLLFSQAGPTSMSLQAKNWLPGPCYRQQRLSKQANDNNNSNFPWTGATKYHLNGRDSLVNPGPAMASHKDDEEKFFPMHGTLIFGKEGTNATNAELENVMITDEEEIRTTNPVATEQYGYVSNNLQNSNTAASTETVNHQGALPGMVWQDRDVYLQGPIWAKIPHTDGHFHPSPLMGGFGLKHPPPQIMIKNTPVPANPPTNFSSAKFASFITQYSTGQVSVEIEWELQKENSKRWNPEIQYTSNYNKSVNVDFTVDTNGVYSEPRPIGTRYLTRNL

SEQ ID NO: 664 - DNA, 2208 bp, unidentified
  source 1..2208: mol_type = unassigned DNA; note = Adeno-associated virus
atggctgccgatggttatcttccagattggctcgaggacactctctctgaaggaataagacagtggtggaagctcaaacctggcccaccaccaccaaagcccgcagagcggcataaggacgacagcaggggtcttgtgcttcctggatacaagtacctcggacccttcaacggactcgacaagggagagccggtcaacgaggcagacgccgcggccctcgagcacgacaaggcctacgaccggcagctcgacagcggagacaacccgtacctcaagtacaaccacgccgacgcggagtttcaggagcgccttaaagaagatacgtcttttgggggcaacctcggacgagcagtcttccaggcgaaaaagagggttcttgaacctctgggcctggttgaggaacctgttaagacggctccgggaaaaaagaggccggtagagcactctcctgtggagccagactcctcctcgggaaccggaaaagcgggcaaccagcctgcaagaaaaagattgaatttcggtcagactggagacgcagactccgtacctgacccccagcctctcggacagccaccagcatccccctctggtctgggaactaatacgatggctacaggcagtggcgcaccaatggcagacaataacgagggcgccgacggagtgggtaattcctcgggaaattggcattgcgattccacatggatgggcgacagagtcgtcaccaccagcacccgcacctgggccctgcccacctacaacaaccacctctacaagcagatttccagccaatcaggagccagcaacgacaaccactactttggctacagcaccccttgggggtattttgacttcaacagattccactgccacttttcgccacgcgactggcagagactcatcaacaacaactggggattccggcccaaaagactcaacttcaagctgtttaacattcaagtcaaggaggtcacgcagaatgacggtacgacgacgattgccaataaccttaccagcacggttcaggtgtttactgacttggagtaccagctcccgtacgtcctcggctcggcgcatcaaggatgcctcccgccgttcccagcagacgtcttcatggtgccacagtatggatacctcaccctgaacaacgggagtcaggcggtaggacgctcttccttttactgcctggagtactttccttctcagatgcttcgcaccggaaacaactttaccttcagctacacttttgaagacgttcctttccacagcagctacgctcacagtcaaagtctggaccgtctcatgaatcctctcatcgaccagtacctgtattacttgagcagaacaaacactccaagcggaaccactacgcagtccaggcttcagttttctcaggccggagcgagtgacattcgggaccagtctaggaactggcttcctggaccctgttaccgccagcagcgagtatcaaagacagctgcggataacaacaacagtgaatactcgtggactggagctaccaagtaccacctcaatggcagagactctctggtgaatccgggcccggccatggccagccacaaggacgatgaagaaaagttttttcctcaaagcggggttctcatctttgggaagcaaggctcagagaaaacaaatgtggacattgaaaaggtcatgattacagacgaagaggaaatcaggaccaccaatcccgtggctacggagcagtatggttctgtatctaccaacctccagagcggcaacacacaagcagctacctcagatgtcaacacacaaggcgttcttccaggcatggtctggcaggacagagacgtgtacctgcaggggcccatctgggcaaaaattccacacacggacggacattttcacccctctcccctcatgggcggatttggacttaaacaccctcctccacagattctcattaagaataccccggtacctgcgaatccttcgaccaccttcagcgcggcaaagtttgcttccttcatcacacagtattccacggggcaggtcagcgtggagatcgagtgggagctgcagaaggagaacagcaaacgctggaatcccgaaattcagtacacttccaactacaacaaatctgttaatgtggactttactgtggacactaatggggtgtattcagagcctcgccctattggcaccagatacctgactcgtaatctgtaa

SEQ ID NO: 665 - DNA, 3159 bp, unidentified
  source 1..3159: mol_type = unassigned DNA; note = Adeno-associated virus
gattgatttagcggccgcgaattcgcccttgctgcgtcaactggaccaatgagaactttcccttcaacgattgcgtcgacaagatggtgatctggtgggaggagggaaagatgaccgccaaggtcgtggagtcggccaaagccattctcggaggaagcaaggtgcgtgtggaccaaaagtgcaagtcttcggcccagatcgacccgactcccgtgatcgtcacctccaacaccaacatgtgcgccgtgattgatggaaactcaacgaccttcgagcaccagcagccgttgcaagaccggatgttcaaatttgaacttacccgccgtctggatcatgactttggaaaggtcaccaagcaggaagtgaaagactttttccggtgggcaaaggatcacgtggttgaggtggagcatgagttctacgtcaaaaagggtggagccaaaaaaagacccgcccccagtgacgcagatataagtgagcccaaacgggcgcgcgagtcagttgcgcagccatcgacgtcagacgcggaagcttcgatcaactacgcggacaggtaccaaaacaaatgttctcgtcacgtgggcatgaatctgatgctgtttccctgcagacaatgcgagagaatgaatcagaattcaaatatctgcttcactcacggacagaaagactgtccatagtgctttcccgtgtcagaatctcaacccgtttctgtcgtcaaaaaggcgtatcagaaactgtgctacattcatcacatcatgggaaaggtgccagacgcttgcactgcttgcgacctggtcaatgtggatttggatgactgcatctctgaacaataaatgatttaaatcaggtatggctgccgatggttatcttccagattggctcgaggacactctctctgaaggaataagacagtggtggaagctcaaacctggcccaccaccaccaaagcccgcagagcggcataaggacgacagcaggggtcttgtgcttcctggatacaagtacctcggacccttcaacggactcgacaagggagagccggtcaacgaggcagacgccgcggccctcgagcacgacaaggcctacgaccggcagctcgacagcggagacaacccgtacctcaagtacaaccacgccgacgcggagtttcaggagcgccttaaagaagatacgtcttttgggggcaacctcggacgagcagtcttccaggcgaaaaagagggttcttgaacctctgggcctggttgaggaacctgttaagacggctccgggaaaaaagaggccggtagagcactctcctgtggagccagactcctcctcgggaaccggaaaagcgggcaaccagcctgcaagaaaaagattgaatttcggtcagactggagacgcagactccgtacctgacccccagcctctcggacagccaccagcatccccctctggtctgggaactaatacgatggctacaggcagtggcgcaccaatggcagacaataacgagggcgccgacggagtgggtaattcctcgggaaattggcattgcgattccacatggatgggcgacagagtcgtcaccaccagcacccgcacctgggccctgcccacctacaacaaccacctctacaagcagatttccagccaatcaggagccagcaacgacaaccactactttggctacagcaccccttgggggtattttgacttcaacagattccactgccacttttcgccacgcgactggcagagactcatcaacaacaactggggattccggcccaaaagactcaacttcaagctgtttaacattcaagtcaaggaggtcacgcagaatgacggtacgacgacgattgccaataaccttaccagcacggttcaggtgtttactgacttggagtaccagctcccgtacgtcctcggctcggcgcatcaaggatgcctcccgccgttcccagcagacgtcttcatggtgccacagtatggatacctcaccctgaacaacgggagtcaggcggtaggacgctcttccttttactgcctggagtactttccttctcagatgcttcgcaccggaaacaactttaccttcagctacacttttgaagacgttcctttccacagcagctacgctcacagtcaaagtctggaccgtctcatgaatcctctcatcgaccagtacctgtattacttgagcagaacaaacactccaagcggaaccactacgcagtccaggcttcagttttctcaggccggagcgagtgacattcgggaccagtctaggaactggcttcctggaccctgttaccgccagcagcgagtatcaaagacagctgcggataacaacaacagtgaatactcgtggactggagctaccaagtaccacctcaatggcagagactctctggtgaatccgggcccggccatggccagccacaaggacgatgaagaaaagttttttcctcaaagcggggttctcatctttgggaagcaaggctcagagaaaacaaatgtggacattgaaaaggtcatgattacagacgaagaggaaatcaggaccaccaatcccgtggctacggagcagtatggttctgtatctaccaacctccagagcggcaacacacaagcagctacctcagatgtcaacacacaaggcgttcttccaggcatggtctggcaggacagagacgtgtacctgcaggggcccatctgggcaaaaattccacacacggacggacattttcacccctctcccctcatgggcggatttggacttaaacaccctcctccacagattctcattaagaataccccggtacctgcgaatccttcgaccaccttcagcgcggcaaagtttgcttccttcatcacacagtattccacggggcaggtcagcgtggagatcgagtgggagctgcagaaggagaacagcaaacgctggaatcccgaaattcagtacacttccaactacaacaaatctgttaatgtggactttactgtggacactaatggggtgtattcagagcctcgccctattggcaccagatacctgactcgtaatctgtaattgcttgttaatcaataaaccgtttaattcgtttcagttgaactttggtctctgcgaagggcgaattcgtttaaacctgcaggactagtccctttagtgagg

SEQ ID NO: 666 - protein, 735 aa, unidentified
  source 1..735: note = Adeno-associated virus
MAADGYLPDWLEDTLSEGIRQWWKLKPGPPPPKPAERHKDDSRGLVLPGYKYLGPFNGLDKGEPVNEADAAALEHDKAYDRQLDSGDNPYLKYNHADAEFQERLKEDTSFGGNLGRAVFQAKKRVLEPLGLVEEPVKTAPGKKRPVEHSPVEPDSSSGTGKAGNQPARKRLNFGQTGDADSVPDPQPLGQPPASPSGLGTNTMATGSGAPMADNNEGADGVGNSSGNWHCDSTWMGDRVVTTSTRTWALPTYNNHLYKQISSQSGASNDNHYFGYSTPWGYFDFNRFHCHFSPRDWQRLINNNWGFRPKRLNFKLFNIQVKEVTQNDGTTTIANNLTSTVQVFTDLEYQLPYVLGSAHQGCLPPFPADVFMVPQYGYLTLNNGSQAVGRSSFYCLEYFPSQMLRTGNNFTFSYTFEDVPFHSSYAHSQSLDRLMNPLIDQYLYYLSRTNTPSGTTTQSRLQFSQAGASDIRDQSRNWLPGPCYRQQRVSKTAADNNNSEYSWTGATKYHLNGRDSLVNPGPAMASHKDDEEKFFPQSGVLIFGKQGSEKTNVDIEKVMITDEEEIRTTNPVATEQYGSVSTNLQSGNTQAATSDVNTQGVLPGMVWQDRDVYLQGPIWAKIPHTDGHFHPSPLMGGFGLKHPPPQILIKNTPVPANPSTTFSAAKFASFITQYSTGQVSVEIEWELQKENSKRWNPEIQYTSNYNKSVNVDFTVDTNGVYSEPRPIGTRYLTRNL

SEQ ID NO: 667 - DNA, 2205 bp, unidentified
  source 1..2205: mol_type = unassigned DNA; note = Adeno-associated virus
atggctgccgatggttatcttccagattggctcgaggacactctctctgaaggaataagacagtggtggaagctcaaacctggcccaccaccaaagcccgcagagcggcataaggacgacagcaggggtcttgtgcttcctggatacaagtacctcggacccttcaacggactcgacaagggagagccggtcaacgaggcagacgccgcggccctcgagcacgacaaggcctacgaccggcagctcgacagcggagacaacccgtacctcaagtacaaccacgccgacgcggagtttcaggagcgccttaaagaagatacgtcttttgggggcaacctcggacgagcagtcttccaggcgaaaaagagggttcttgaacctctgggcctggttgaggaacctgttaagacggctccgggaaaaaagaggcccgtagagcactctcctgtggagccagactcctcctcgggaaccggaaaagcgggcaaccagcctgcaagaaaaagattgaatttcggtcagactggagacgcagactccgtacctgacccccagcctctcggacagccaccagcagccccctctggtctgggaactaatacgatggctacaggcagtggcgcaccaatggcagacaataacgagggcgccgacggagtgggtaattcctcgggagattggcattgcgattccacatggatgggcgacagagtcatcaccaccagcacccgcacctgggccctgcccacctacaacaaccacctctacaagcagatttccagccaatcaggagccagcaatgacaaccactactttggctacagcaccccttgggggtattttgacttcaacagattccactgccacttttcgccacgcgactggcagagactcatcaacaacaactggggattccggcccaaaagactcaacctcaagctgtttaacattcaagtcaaggaggtcacgcagaatgacggtacgacgacgattgccaataaccttaccagcacggttcaggtgtttactgacttggagtaccagctcccgtacgtcctcggctcggcgcatcaaggatgcctcccgccgttcccagcagacgtcttcatggtgccacagtatggatacctcaccctgaacaacgggagtcaggcggtaggacgctcttccttttactgcctggagtactttccttctcagatgcttcgtaccggaaacaactttaccttcagctacacttttgaagacgttcctttccacagcagctacgctcacagtcaaagtctggaccgtctcatgaatcctctcatcgaccagtacctgtattacttgagcagaacaaacactccaagcggaaccactacgcagtccaggcttcagttttctcaggccggagcgagtgacattcgggaccagtctaggaactggcttcctggaccctgttaccgccagcagcgagtatcaaagacagctgcggataacaacaacggtgaatactcgtggactggagctaccaagtaccacctcaatggcagagactctctggtgaatccgggcccggccatggccagccacaaggacgatgaagaaaagttttttcctcaaagcggggttctcatctttgggaagcaaggctcagagaaaacaaatgtggacattgaaaaggtcatgattacagacgaagaggaaatcaggaccaccaatcccgtggctacggagcagtatggttctgtatctaccaacctccagagcggcaacacacgagcagctacctcagatgtcaacacacaaggcgttcttccaggcatggtctggcaggacagagacgtgtacctgcaggggcccatctgggcaaaaattccacacacggacggacattttcacccctctcccctcatgggcggatttggacttaaacaccctcctccacagattctcattaagaataccccggtacctgcgaatccttcgaccaccttcagcgcggcaaagtttgcttccttcatcacacagtattccacggggcaggtcagcgtggagatcgagtgggagctgcagaaggagaacagcaaacgctggaatcccgaaattcagtacacttccaactacaacaaatctgttaatgtggactttactgtggacactaatggggtgtattcagagcctcgccctattggcaccagatacctgactcgtaatctgtaa

SEQ ID NO: 668 - DNA, 3156 bp, unidentified
  source 1..3156: mol_type = unassigned DNA; note = Adeno-associated virus
cgattgaatttagcggccgcgaattcgcccttgctgcgtcaacggaccaatgagaactttcccttcaacgattgcgtcgacaagatggtgatctggtgggaggagggaaagatgaccgccaaggtcgtggagtcggccaaagccattctcggaggaagcaaggtgcgtgtggaccaaaagtgcaagtcttcggcccagatcgacccgactcccgtgatcgtcacctccaacaccaacatgtgcgccgtgattgatggaaactcaacgaccttcgagcaccagcagccgttgcaagaccggatgttcaaatttgaacttacccgccgtctggatcatgactttggaaaggtcaccaagcaggaagtgaaagactttttccggtgggcaaaggatcacgtggttgaggtggagcatgagttctacgtcaaaaagggtggagccaaaaaaagacccgcccccagtgacgcagatataagtgagcccaaacgggcgcgcgagtcagttgcgcagccatcgacgtcagacgcggaagcttcgatcaactacgcggacaggtaccaaaacaaatgttctcgtcacgtgggcatgaatctgatgctgtttccctgcagacaatgcgagcgaatgaatcagaattcaaatatctgcttcactcacggacagaaagactgtttagagtgctttcccgtgtcagaatctcaacccgtttctgtcgtcaaaaaggcgtatcagaaactgtgctacattcatcacatcatgggaaaggtgccagacgcttgcactgcttgcgacctggtcaatgtggatttggatgactgcatctctgaacaataaatgatttaaatcaggtatggctgccgatggttatcttccagattggctcgaggacactctctctgaaggaataagacagtggtggaagctcaaacctggcccaccaccaaagcccgcagagcggcataaggacgacagcaggggtcttgtgcttcctggatacaagtacctcggacccttcaacggactcgacaagggagagccggtcaacgaggcagacgccgcggccctcgagcacgacaaggcctacgaccggcagctcgacagcggagacaacccgtacctcaagtacaaccacgccgacgcggagtttcaggagcgccttaaagaagatacgtcttttgggggcaacctcggacgagcagtcttccaggcgaaaaagagggttcttgaacctctgggcctggttgaggaacctgttaagacggctccgggaaaaaagaggcccgtagagcactctcctgtggagccagactcctcctcgggaaccggaaaagcgggcaaccagcctgcaagaaaaagattgaatttcggtcagactggagacgcagactccgtacctgacccccagcctctcggacagccaccagcagccccctctggtctgggaactaatacgatggctacaggcagtggcgcaccaatggcagacaataacgagggcgccgacggagtgggtaattcctcgggagattggcattgcgattccacatggatgggcgacagagtcatcaccaccagcacccgcacctgggccctgcccacctacaacaaccacctctacaagcagatttccagccaatcaggagccagcaatgacaaccactactttggctacagcaccccttgggggtattttgacttcaacagattccactgccacttttcgccacgcgactggcagagactcatcaacaacaactggggattccggcccaaaagactcaacctcaagctgtttaacattcaagtcaaggaggtcacgcagaatgacggtacgacgacgattgccaataaccttaccagcacggttcaggtgtttactgacttggagtaccagctcccgtacgtcctcggctcggcgcatcaaggatgcctcccgccgttcccagcagacgtcttcatggtgccacagtatggatacctcaccctgaacaacgggagtcaggcggtaggacgctcttccttttactgcctggagtactttccttctcagatgcttcgtaccggaaacaactttaccttcagctacacttttgaagacgttcctttccacagcagctacgctcacagtcaaagtctggaccgtctcatgaatcctctcatcgaccagtacctgtattacttgagcagaacaaacactccaagcggaaccactacgcagtccaggcttcagttttctcaggccggagcgagtgacattcgggaccagtctaggaactggcttcctggaccctgttaccgccagcagcgagtatcaaagacagctgcggataacaacaacggtgaatactcgtggactggagctaccaagtaccacctcaatggcagagactctctggtgaatccgggcccggccatggccagccacaaggacgatgaagaaaagttttttcctcaaagcggggttctcatctttgggaagcaaggctcagagaaaacaaatgtggacattgaaaaggtcatgattacagacgaagaggaaatcaggaccaccaatcccgtggctacggagcagtatggttctgtatctaccaacctccagagcggcaacacacgagcagctacctcagatgtcaacacacaaggcgttcttccaggcatggtctggcaggacagagacgtgtacctgcaggggcccatctgggcaaaaattccacacacggacggacattttcacccctctcccctcatgggcggatttggacttaaacaccctcctccacagattctcattaagaataccccggtacctgcgaatccttcgaccaccttcagcgcggcaaagtttgcttccttcatcacacagtattccacggggcaggtcagcgtggagatcgagtgggagctgcagaaggagaacagcaaacgctggaatcccgaaattcagtacacttccaactacaacaaatctgttaatgtggactttactgtggacactaatggggtgtattcagagcctcgccctattggcaccagatacctgactcgtaatctgtaattgcttgttaatcaataaaccgtttaattcgtttcagttgaactttggtctctgcgaagggcgaattcgtttaaacctgcaggactagtccctttagtgag

SEQ ID NO: 669 - protein, 734 aa, unidentified
  source 1..734: note = Adeno-associated virus
MAADGYLPDWLEDTLSEGIRQWWKLKPGPPPKPAERHKDDSRGLVLPGYKYLGPFNGLDKGEPVNEADAAALEHDKAYDRQLDSGDNPYLKYNHADAEFQERLKEDTSFGGNLGRAVFQAKKRVLEPLGLVEEPVKTAPGKKRPVEHSPVEPDSSSGTGKAGNQPARKRLNFGQTGDADSVPDPQPLGQPPAAPSGLGTNTMATGSGAPMADNNEGADGVGNSSGDWHCDSTWMGDRVITTSTRTWALPTYNNHLYKQISSQSGASNDNHYFGYSTPWGYFDFNRFHCHFSPRDWQRLINNNWGFRPKRLNLKLFNIQVKEVTQNDGTTTIANNLTSTVQVFTDLEYQLPYVLGSAHQGCLPPFPADVFMVPQYGYLTLNNGSQAVGRSSFYCLEYFPSQMLRTGNNFTFSYTFEDVPFHSSYAHSQSLDRLMNPLIDQYLYYLSRTNTPSGTTTQSRLQFSQAGASDIRDQSRNWLPGPCYRQQRVSKTAADNNNGEYSWTGATKYHLNGRDSLVNPGPAMASHKDDEEKFFPQSGVLIFGKQGSEKTNVDIEKVMITDEEEIRTTNPVATEQYGSVSTNLQSGNTRAATSDVNTQGVLPGMVWQDRDVYLQGPIWAKIPHTDGHFHPSPLMGGFGLKHPPPQILIKNTPVPANPSTTFSAAKFASFITQYSTGQVSVEIEWELQKENSKRWNPEIQYTSNYNKSVNVDFTVDTNGVYSEPRPIGTRYLTRNL

SEQ ID NO: 670 - DNA, 2208 bp, unidentified
  source 1..2208: mol_type = unassigned DNA; note = Adeno-associated virus
atggctgccgatggttatcttccagattggctcgaggacactctctctgaaggaataagacagtggtggaagctcaaacctggcccaccaccaccaaagcccgcagagcggcataaggacgacagcaggggtcttgtgcttcctgggtacaagtacctcggacccttcaacggactcgacaagggagagccggtcaacgaggcagacgccgcggccctcgagcacgacaaggcctacgaccggcagctcgacagcggagacaacccgtacctcaagtacgaccacgccgacgcggagtttcaggagcgccttaaagaagatacgtcttttgggggcaacctcggacgagcagtcttccaggcaaaaaagagggttcttgaacctctgggcctggttgaggagcctgttaagacggctccgggaaaaaagaggccggtagagcactctcctgtggagccagactcctcctcgggaaccggaaaagcgggcaaccagcctgcaagaaagagattgaatttcggtcagactggagacgcagactccgtacctgacccccagcctctcggacagccaccagcagccccctctggtctgggaactaatacgatggctacaggcagtggcgcaccaatggcagacaataacgatggcgccgacggagtgggtaattcctcgggaaattggcattgcgattccacatggatgggcgacagagtcatcaccaccagcacccgaacctgggctctgcccacctacaacaaccatctgtacaagcagatttccagccaatcaggagccagcaacgacaaccactactttggctacagcaccccttgggggtattttgacttcaacagattccactgccacttttcaccacgtgactggcaaagactcatcaacaacaactggggattccggcccaagagactcaacttcaagctctttaacattcaagtcagagaggtcacgcagaatgatggtacgacgacgattgccaataaccttaccagcacggttcaggtgtttactgactcggagtaccagctcccgtacgtcctcggctcggcgcatcaaggatgcctcccgccgttcccagcagacgtcttcatggtgccacagtatggatacctcaccctgaacaacgggagtcaggcagtaggacgctcttcattttactgcctggagtacttcccttctcagatgctgcgtaccggaaacaactttaccttcagctacacctttgaggatgttcctttccacagcagctacgctcacagccagagtttggaccgtctcatgaatcctctcatcgaccagtacctgtattacttgagcagaacaaacactccaagcggaaccaccacgcagtccaggcttcagttttctcaggccggagcgagtgacattcgggatcagtctaggaactggcttcctggaccctgttaccgccagcagcgagtatcaaagacatctgcggacaacaacaacagtgaatactcgtggattggagctaccaagtaccacctcaatggcagagactctctggtgaatccgggcccggcaatggccagccacaaggacgatgaagaaaagttttttcctcagagcggggttctcatctttggaaaacaaggatcagagaaaacaaatgtggacattgaaaaggtcatgattacagacgaagaggaaatcagaaccaccaatcccgtggccacggagcagtatggttctgtatctaccaacctccagagcggcaacacacaagcatctactgcagatgtcaacacacaaggcgttcttccaggcatggtctggcaggacagagacgtgtacctgcaggggcctatctgggcaaagattccgcacacggacggacattttcacccctctcccctcatgggcggattcggacttaaacaccctcctccacagattctcatcaaaaacaccccggtacctgcgaatccttcgaccaccttcagtgcggcaaagtttgcttccttcatcacacagtattccacggggcgggtcagcgtggagatcgagtgggagctacagaaggagaacagcaaacgctggaatcccgagatccagtacacttccaactacaacaaatctgttaatgtggactttactgtggacactaatggtgtgtattcagagcctcgccccattggcaccagatacctgactcgtaatctgtaa

SEQ ID NO: 671 - protein, 735 aa, unidentified
  source 1..735: note = Adeno-associated virus
MAADGYLPDWLEDTLSEGIRQWWKLKPGPPPPKPAERHKDDSRGLVLPGYKYLGPFNGLDKGEPVNEADAAALEHDKAYDRQLDSGDNPYLKYDHADAEFQERLKEDTSFGGNLGRAVFQAKKRVLEPLGLVEEPVKTAPGKKRPVEHSPVEPDSSSGTGKAGNQPARKRLNFGQTGDADSVPDPQPLGQPPAAPSGLGTNTMATGSGAPMADNNDGADGVGNSSGNWHCDSTWMGDRVITTSTRTWALPTYNNHLYKQISSQSGASNDNHYFGYSTPWGYFDFNRFHCHFSPRDWQRLINNNWGFRPKRLNFKLFNIQVREVTQNDGTTTIANNLTSTVQVFTDSEYQLPYVLGSAHQGCLPPFPADVFMVPQYGYLTLNNGSQAVGRSSFYCLEYFPSQMLRTGNNFTFSYTFEDVPFHSSYAHSQSLDRLMNPLIDQYLYYLSRTNTPSGTTTQSRLQFSQAGASDIRDQSRNWLPGPCYRQQRVSKTSADNNNSEYSWIGATKYHLNGRDSLVNPGPAMASHKDDEEKFFPQSGVLIFGKQGSEKTNVDIEKVMITDEEEIRTTNPVATEQYGSVSTNLQSGNTQASTADVNTQGVLPGMVWQDRDVYLQGPIWAKIPHTDGHFHPSPLMGGFGLKHPPPQILIKNTPVPANPSTTFSAAKFASFITQYSTGRVSVEIEWELQKENSKRWNPEIQYTSNYNKSVNVDFTVDTNGVYSEPRPIGTRYLTRNL

SEQ ID NO: 672 - DNA, 2217 bp, unidentified
  source 1..2217: mol_type = unassigned DNA; note = Adeno-associated virus
atggctgccgatggttatcttccagattggctcgaggacaacctctctgagggcattcgcgagtggtgggacttgaaacctggagccccgaaacccaaagccaaccagcaaaagcaggacgacggccggggtctggtgcttcctggctacaagtacctcggacccttcaacggactcgacaagggggagcccgtcaacgcggcggacgcagcggccctcgagcacgacaaggcctacgaccagcagctcaaagcgggtgacaatccgtacctgcggtataaccacgccgacgccgagtttcaggagcgtctgcaagaagatacgtcttttgggggcaacctcgggcgagcagtcttccaggccaagaagcgggttctcgaacctctcggtctggttgaggaaggcgctaagacggctcctggaaagaagagaccggtagagccatcaccccagcgttctccagactcctctacgggcatcggcaagacaggccagcagcccgcgaaaaagagactcaactttgggcagactggcgactcagagtcagtgcccgaccctcaaccaatcggagaaccccccgcaggcccctctggtctgggatctggtacaatggctgcaggcggtggcgctccaatggcagacaataacgaaggcgccgacggagtgggtagttcctcaggaaattggcattgcgattccgcatggctgggcgacagagtcatcaccaccagcacccgaccctgggccctccccacctacaacaaccacctctacaagcaaatctccaacgggacatcgggaggaagcaccaacgacaacacctacttcggctacagcaccccctgggggtattttgactttaacagattccactgccacttctcaccacgtgactggcagcgactcatcaacaacaactggggattccggcccaagagactcaacttcaagctcttcaacatccaggtcaaggaggtcacgcagaatgaaggcaccaagaccatcgccaataaccttaccagcacgattcaggtctttacggactcggaataccagctcccgtacgtcctcggctctgcgcaccagggctgcccgcctccgttcccggcggacgtcttcatgattcctcagtacgggtacctgactctgaacaacggcagtcaggccgtgggccgttcctccttctactgcctggagtactttccttctcaaatgcggagaacgggcaacaactttgagttcagctaccagtttgaggacgtgccttttcacagcagctacgcgcatagccaaagcctggaccggctgatgaaccccctcatcgaccagtacctgtactacctgtctcggactcagtccacgggaggtaccgcaggaactcagcagttgctattttctcaggccgggcctaataacatgtcggctcaggccaaaaactggctacccgggccctgctaccggcagcaacgcgtctccacgacactgtcgcaaaataacaacagcaactttgcttggaccggtgccaccaagtatcatctgaatggcagagactctctggtaaatcccggtgtcgctatggcaacgcacaaggacgacgaagagcgattttttccatccagcggagtcttgatgtttgggaaacagggagctggaaaagacaacgtggactatagcagcgttatgctaaccagtgaggaagaaatcaaaaccaccaacccagtggccacagaacagtacggcgtggtggccgataacctgcaacagcaaaacgccgctcctattgtaggggccgtcaacagtcaaggagccttacctggcatggtctggcagaaccgggacgtgtacctgcagggtcctatctgggccaagattcctcacacggacggcaactttcatccttcgccgctgatgggaggctttggactgaaacacccgcctcctcagatcctgattaagaatacacctgttcccgcggatcctccaactaccttcagtcaagccaagctggcgtcgttcatcacgcagtacagcaccggacaggtcagcgtggaaattgaatgggagctgcagaaagagaacagcaagcgctggaacccagagattcagtatacttccaactactacaaatctacaaatgtggactttgctgtcaatactgagggtacttattcagagcctcgccccattggcacccgttacctcacccgtaacctgtaa

SEQ ID NO: 673 - protein, 738 aa, unidentified
  source 1..738: note = Adeno-associated virus
MAADGYLPDWLEDNLSEGIREWWDLKPGAPKPKANQQKQDDGRGLVLPGYKYLGPFNGLDKGEPVNAADAAALEHDKAYDQQLKAGDNPYLRYNHADAEFQERLQEDTSFGGNLGRAVFQAKKRVLEPLGLVEEGAKTAPGKKRPVEPSPQRSPDSSTGIGKTGQQPAKKRLNFGQTGDSESVPDPQPIGEPPAGPSGLGSGTMAAGGGAPMADNNEGADGVGSSSGNWHCDSAWLGDRVITTSTRPWALPTYNNHLYKQISNGTSGGSTNDNTYFGYSTPWGYFDFNRFHCHFSPRDWQRLINNNWGFRPKRLNFKLFNIQVKEVTQNEGTKTIANNLTSTIQVFTDSEYQLPYVLGSAHQGCPPPFPADVFMIPQYGYLTLNNGSQAVGRSSFYCLEYFPSQMRRTGNNFEFSYQFEDVPFHSSYAHSQSLDRLMNPLIDQYLYYLSRTQSTGGTAGTQQLLFSQAGPNNMSAQAKNWLPGPCYRQQRVSTTLSQNNNSNFAWTGATKYHLNGRDSLVNPGVAMATHKDDEERFFPSSGVLMFGKQGAGKDNVDYSSVMLTSEEEIKTTNPVATEQYGVVADNLQQQNAAPIVGAVNSQGALPGMVWQNRDVYLQGPIWAKIPHTDGNFHPSPLMGGFGLKHPPPQILIKNTPVPADPPTTFSQAKLASFITQYSTGQVSVEIEWELQKENSKRWNPEIQYTSNYYKSTNVDFAVNTEGTYSEPRPIGTRYLTRNL

SEQ ID NO: 674 - protein, 735 aa, unidentified
  source 1..735: note = Adeno-associated virus
MAADGYLPDWLEDTLSEGIRQWWKLKPGPPPPKPAERHKDDSRGLVLPGYKYLGPFNGLDKGEPVNEADAAALEHDKAYDRQLDSGDNPYLKYNHADAEFQERLKEDTSFGGNLGRAVFQAKKRVLEPLGLVEEPVKTAPGKKRPVEHSPVEPDSSSGTGKAGQQPARKRLNFGQTGDADSVPDPQPLGQPPAAPSGLGSTTMATGSGAPMADNNEGADGVGNSSGNWHCDSQWLGDRVITTSTRTWALPTYNNHLYKQISSQSGASNDNHYFGYSTPWGYFDFNRFHCHFSPRDWQRLINNNWGFRPKRLNFKLFNIQVKEVTQNDGTTTIANNLTSTVQVFTDSEYQLPYVLGSAHQGCLPPFPADVFMVPQYGYLTLNNGSQAVGRSSFYCLEYFPSQMLRTGNNFQFSYTFEDVPFHSSYAHSQSLDRLMNPLVDQYLYYLNKTQTNSGTLQQSRLLFSQAGPTNMSLQAKNWLPGPCYRQQRLSKQANDNNNSNFPWTAATKYHLNGRDSLVNPGPAMASHKDDEEKFFPMHGTLIFGKQGTNANDADLENVMITDEEEIRTTNPVATEQYGTVSNNLQNSNTGPTTGTVNHQGALPGMVWQDRDVYLQGPIWAKIPHTDGHFHPSPLMGGFGLKHPPPQIMIKNTPVPANPPTNFSSAKFASFITQYSTGQVSVEIEWELQKENSKRWNPEIQYTSNYNKSVNVDFTVDTNGVYSEPRPIGTRYLTRNL

SEQ ID NO: 675 - DNA, 3158 bp, unidentified
  source 1..3158: mol_type = unassigned DNA; note = Adeno-associated virus
gattgaatttagcggccgcgaattcgcccttgctgcgtcaactggaccaatgagaactttcctttcaatgattgcgtcgacaagatggtgatctggtgggaggagggaaagatgaccgccaaggtcgtggagtcggccaaagccattctcggaggaagcaaggtgcgcgcggaccagaaatgcaagtcctcggcccagatagacccgactcccgtgattgtcacctccaacaccaacatgtgcgccgtgattgacgggaactcaacgaccttcgaacaccagcagccgttgcaagaccggatgttcaaatttgaactcacccgccgtctggatcatgactttgggaaggtcaccaagcaggaagtcaaagactttttccggtgggcaaaggatcacgtggttgaggtggagcatgaattctacgtcaaaaagggtggagctaagaaaagacccgcccccagtgacgcagatataagtgagcccaaacgggcgcgcgagtcagttgcgcagccatcgacgtcagacgcggaagcttcgatcaactacgcgggcaggtaccaaaacaaatgttctcgtcacgtgggcatgaatctgatgctgtttccctgcagacaatgcgagagaatgaatcagaattcaaatatctgcttcactcacggacagaaagactgtttagagtgctttcccgtgtcagaatctcaacccgtttctgtcgtcaaaaaggcgtatcagaaactttgctacattcatcatatcatgggaaaggtgccagacgcttgcactgcctgcgatctggtcaatgtggatttggatgactgcatctctgaacaataaatgatttaaatcaggtatggctgccgatggttatcttccagattggctcgaggacactctctctgaaggaataagacagtggtggaagctcaaacctggcccaccaccaccaaagcccgcagagcggcataaggacgacagcaggggtcttgtgcttcctgggtacaagtacctcggacccttcaacggactcgacaagggggagccggtcaacgaggcagacgccgcggccctcgagcacgacaaggcctacgaccggcagctcgacagcggagacaacccgtacctcaagtacaaccacgccgacgcggagtttcaggagcgccttaaagaagatacgtcttttgggggcaacctcggacgagcagtcttccaggcaaaaaagagggttcttgaacctctgggcctggttgaggaacctgttaaaacggctccgggaaaaaagaggccggtagagcactctcctgtggagccagactcctcctcgggaaccggaaaagcgggccagcagcctgcaagaaaaagattgaatttcggtcagactggagacgcagactccgtacctgacccccagcctctcggacagccaccagcagccccctctggtctgggatctactacaatggctacaggcagtggcgcaccaatggcagacaataacgagggtgccgatggagtgggtaattcctcgggaaattggcattgcgattcccaatggctgggcgacagagtcatcaccaccagcacccgcacctgggccctgcccacctacaacaaccacctctacaagcaaatctccagccaatcaggagcctcaaacgacaaccactactttggctacagcaccccctgggggtattttgacttcaacagattccactgccacttttcaccacgtgactggcaaagactcatcaacaacaactggggattccgacccaagagactcaacttcaagctctttaacattcaagtcaaagaggtcacgcagaatgacggtacgacgacgattgccaataaccttaccagcacggttcaggtgtttactgactcggagtaccagctcccgtacgtcctcggctcggcgcatcaaggatgcctcccgccgtttccagcggacgtcttcatggtcccacagtatggatacctcaccctgaacaacgggagtcaggcagtaggacgctcttcattttactgcctggagtactttccttctcagatgctgcgtaccggaaacaactttcaattcagctacacttttgaagacgtgcctttccacagcagctacgctcacagccagagtctggatcggctgatgaatcctctggtcgaccagtacctgtattatctgaacaagacacaaacaaatagtggaactcttcagcagtctcggctactgtttagccaagctggacccaccaacatgtctcttcaagctaaaaactggctgcctggaccttgctacagacagcagcgtctgtcaaagcaggcaaacgacaacaacaacagcaactttccctggactgcagctacaaagtatcatctaaatggccgggactcgttggttaatccaggaccagctatggccagtcacaaggatgacgaagaaaagtttttccccatgcatggaacccttatatttggtaaacaaggaacaaatgccaacgacgcggatttggaaaatgtcatgattacagatgaagaagaaatcaggaccaccaatcccgtggctacggagcagtacggaactgtatcaaataatttgcaaaactcaaacactggtccaactactggaactgtcaatcaccaaggagcgttacctggtatggtgtggcaggatcgagacgtgtacctgcagggacccatttgggccaagattcctcacaccgatggacactttcatccttctccactgatgggaggttttggactcaaacacccacctcctcaaatcatgatcaaaaacactcccgttccagccaatcctcccacaaacttcagttctgccaagtttgcttctttcatcacacagtattccacggggcaggtcagcgtggagatcgagtgggagctgcagaaggagaacagcaaacgctggaatcccgaaattcagtacacttccaactacaacaaatctgttaatgtggactttactgtggacactaatggtgtgtattcagagcctcgccccattggcaccagatacctgactcgtaatctgtaattgcttgttaatcaataaaccgtttaattcgtttcagttgaactttggtctctgcgaagggcgaattcgtttaaacctgcaggactagtccctttagtga

SEQ ID NO: 676 - protein, 735 aa, unidentified
  source 1..735: note = Adeno-associated virus
MAADGYLPDWLEDTLSEGIRQWWKLKPGPPPPKPAERHKDDSRGLVLPGYKYLGPFNGLDKGEPVNEADAAALEHDKAYDRQLDSGDNPYLKYNHADAEFQERLKEDTSFGGNLGRAVFQAKKRVLEPLGLVEEPVKTAPGKKRPVEHPPVEPDSSSGTGKAGQQPARKRLNFGQTGDADSVPDPQPLGQPPAAPSGLGSTTMATGSGAPMADNNEGADGVGNSSGNWHCDSQWLGDRVITTSTRTWALPTYNNHLYKQISSQSGASNDNHYFGYSTPWGYFDFNRFHCHFSPRDWQRLINNNWGFRPKRLNFKLFNIQVKEVTQNDGTTTIANNLTSTVQVFTDSEYQLPYVLGSAHQGCLPPFPADVFMVPQYGYLTLNNGSQAVGRSSFYCLEYFPSQMLRTGNNFQFSYTFEDVPFHSSYAHSQSLDRLMNPLIDQYLYYLNKTQTNSGTLQQSRLLFSQAGPTNMSLQAKNRLPGPCYRQQRLSKQANDNNNSNFPWTAATKYHLNGRDSLVNPGPAMASHKDDEEKFFPMHGTLIFGKQGTNANDADLENVMITDEEEIRTTNPVATEQYGTVSNNLQNSNTGPTTGTVNHQGALPGMVWQDRDVYLQGPIWAKIPHTDGHFHPSPLVGGFGLKHPPPQIMIKNTPVPANPPTNFSSAKFASFITQYSTGQVSVEIEWELQKENSKRWNPEIQYTSNYNKSVNVDFTVDTNGVYSEPRPIGTRYLTRNL

SEQ ID NO: 677 - DNA, 3159 bp, unidentified
  source 1..3159: mol_type = unassigned DNA; note = Adeno-associated virus
gattgaatttagcggccgcgaattcgcccttgctgcgtcaactggaccaatgagaactttcctttcaatgattgcgtcgacaagatggtgatctggtgggaggagggaaagatgaccgccaaggtcgtggagtcggccaaagccattctcggaggaagcaaggtgcgcgtggaccagaaatgcaagtcctcggcccagatagacccgactcccgtgattgtcacctccaacaccgacatgtgcgccgtgattgacgggaactcaacgaccttcgaacaccagcagccgttgcaagaccggatgttcaaatttgaactcacccgccgtctggatcatgactttgggaaggtcaccaagcaggaagtcaaagactttttccggtgggcaaaggatcacgtggttgaggtggagcatgaattctacgtcaaaaagggtggagctaagaaaagacccgcccccagtgacgcagatataagtgagcccaaacgggcgcgcgagtcagttgcgcagccatcgacgtcagacgcggaagcttcgatcaactacgcggacaggtaccaaaacaaatgttctcgtcacgtgggcatgaatctgatgctgtttccctgcagacaatgcgagagaatgaatcagaattcaaatatctgcttcactcacggacagaaagactgtttagagtgctttcccgtgtcagaatctcaacccgtttctgtcgtcaaaaaggcgtatcagaaactttgctacattcatcatatcatgggaaaggtgccagacgcttgcactgcctgcgatctggtcaatgtggatttggatgactgcatctctgaacaataaatgatttaaatcaggtatggctgccgatggttatcttccagattggctcgaggacactctctctgaaggaataagacagtggtggaagctcaaacctggcccaccaccaccaaagcccgcagagcggcataaggacgacagcaggggtcttgtgcttcctgggtacaagtacctcggacccttcaacggactcgacaagggggagccggtcaacgaggcagacgccgcggccctcgagcacgacaaggcctacgaccggcagctcgacagcggagacaacccgtacctcaagtacaaccacgccgacgcggagtttcaggagcgccttaaagaagatacgtcttttgggggcaacctcggacgagcagtcttccaggcaaaaaagagggttcttgaacctctgggcctggttgaggaacctgttaaaacggctccgggaaaaaagaggccggtagagcaccctcctgtggagccagactcctcctcgggaaccggaaaagcgggccagcagcctgcaagaaaaagattgaatttcggtcagactggagacgcagactccgtacctgacccccagcctctcggacagccaccagcagccccctctggtctgggatctactacaatggctacaggcagtggcgcaccaatggcagacaataacgagggtgccgatggagtgggtaattcctcgggaaattggcattgcgattcccaatggctgggcgacagagtcatcaccaccagcacccgcacctgggccctgcccacctacaacaaccacctctacaagcaaatctccagccaatcaggagcctcaaacgacaaccactactttggctacagcaccccctgggggtattttgacttcaacagattccactgccacttttcaccacgtgactggcaaagactcatcaacaacaactggggattccgacccaagagactcaacttcaagctctttaacattcaagtcaaagaggtcacgcagaatgacggtacgacgacgattgccaataaccttaccagcacggttcaggtgtttactgactcggagtaccagctcccgtacgtcctcggctcggcgcatcaaggatgcctcccgccgtttccagcggacgtcttcatggtcccacagtatggatacctcaccctgaacaacgggagtcaggcagtaggacgctcttcattttactgcctggagtactttccttctcagatgctgcgtaccggaaacaactttcagttcagctacacttttgaagacgtgcctttccacagcagctacgctcacagccagagtctggatcggctgatgaatcctctgatcgaccagtacctgtattatctgaacaagacacaaacaaatagtggaactcttcagcagtctcggctactgtttagccaagctggacccaccaacatgtctcttcaagctaaaaaccggctgcctggaccttgctacagacagcagcgtctgtcaaagcaggcaaacgacaacaacaacagcaactttccctggaccgcagctacaaagtatcatctaaatggccgggactcgttggttaatccaggaccagctatggccagtcacaaggatgacgaagaaaagtttttccccatgcatggaacccttatatttggtaaacaaggaacaaatgccaacgacgcggatttggaaaatgtcatgattacagatgaagaagaaatcaggaccaccaatcccgtggctacggagcagtacggaactgtatcaaataatttgcaaaactcaaacactggtccaactactggaactgtcaatcaccaaggagcgttacctggtatggtgtggcaggatcgagacgtgtacctgcagggacccatttgggccaagattcctcacaccgatggacactttcatccttctccactggtgggaggttttggactcaaacacccacctcctcaaatcatgatcaaaaacactcccgttccagccaatcctcccacaaacttcagttctgccaagtttgcttctttcatcacacagtattccacggggcaggtcagcgtggagatcgagtgggagctgcagaaggagaacagcaaacgctggaatcccgaaattcagtacacttccaactacaacaaatctgttaatgtggactttactgtggacactaatggtgtgtattcagagcctcgccccattggcaccagatacctgactcgtaatctgtaattgcttgttaatcaataaaccgtttaattcgtttcagttgaactttggtctctgcgaagggcgaattcgtttaaacctgcaggactagtccctttagtgag

SEQ ID NO: 678 - DNA, 2208 bp, unidentified
  source 1..2208: mol_type = unassigned DNA; note = Adeno-associated virus
atggctgccgatggttatcttccagattggctcgaggacactctctctgaaggaataagacagtggtggaagctcaaacctggcccaccaccaccaaagcccgcagagcggcataaggacgacagcaggggtcttgtgcttcctgggtacaagtaccttggacccttcaacggactcgacaagggagagccggtcaacgaggcagacgccgcggccctcgagcacgacaaggcctacgaccggcagctcgacagcggagacaacccgtaccccaagtacaaccacgccgacgcggagttccaggagcgtcttaaagaagatacgtcttttgggggcaacctcggacgagcagtcttccaggcgaaaaagagggttcttgaacctctgggcctggttgaggaacctgttaagacggctccgggaaaaaagaggccggtagagcactctcctgcggagccagactcctcctcgggaaccggaaaagcgggccagcagcctgcaagaaagagattgaatttcggtcagactggagacgcagactccgtacctgacccccagcctctcggacagccaccagcagccccctctggtctgggaactaatacgatggctacaggcagtggcgcaccaatggcagacaataacgagggcgccgacggagtgggtaattcctcgggaaattggcattgcgattccacatggatgggcgacagagtcatcaccaccagcacccgcacctgggctctgcccacctacaacaaccacctctacaagcagatttccagccaatcaggagcctcaaacgacaaccactactttggctacagcaccccttgggggtattttgacttcaacagattccactgccacttttcgccacgtgactggcaaagactcatcaacaacaattggggattccggcccaaaagactcaacttcaagctctttaacattcaagtcaaggaggtcacgcagaatgacggtacgacgacgattgccaataaccttaccagcacggttcaggtgtttactgactcggagtaccagctcccgtacgtcctcggctcggcgcatcaaggatgcctcccgccgttcccagcagacgtcttcatggtgccacagtatggatacctcaccctgaacaacgggagtcaggcagtaggacgctcttcattttactgcctggagtactttccttctcagatgctgcgtaccggaaacaactttaccttcagctacacctttgaggacgttcctttccacagcagctacgcccacagccagagtttggaccgtctcatgaatcctctcatcgaccagtacctgtattacttgagcagaacaaacactccaagcggaaccaccacgcagtcaaggcttcagttttctcaggccggagcaagtgacattcgggaccagtctaggaactggcttcctggaccctgttaccgccagcagcgagtatcaaagacatctgcggataacaacaacagtgaatactcgtggactggagctaccaagtaccaccttaatggaagagactctctggtgaatccgggcccggccatggccagccacaaggacgatgaagaaaagttttttcctcagagcggggttctcatctttggaaaacaagactcgggaaaaactaatgtggacattgaaaaggtcatgattacagacgaagaggaaatcaggaccaccaatcccgtggctacggagcagtatggttctgtatctaccaacctccagagcggcaacacacaagcagctacctcagatgtcaacacacaaggcgttcttccaggcatggtgtggcaggacagagacgtgtacctgcaggggcccatctgggcaaagattccacacacggacggacattttcacccctctcccctcatgggcggattcggacttaaacaccctcccccgcagattctcatcaagaacaccccggtacctgcgaatccttcgactaccttcagtgcggcaaagtttgcttccttcattacacagtactccacggggcaggtcagcgtggagatcgagtgggagctgcagaaggagaacagcaaacgctggaatcccgagattcagtacacttccaactacaacaaatctgttaatgtggactttactgtggacactaatggtgtgtattcagagcctcgccccattggcaccaggtacctgactcgtaatctgtaa

SEQ ID NO: 679 - protein, 735 aa, unidentified
  source 1..735: note = Adeno-associated virus
MAADGYLPDWLEDTLSEGIRQWWKLKPGPPPPKPAERHKDDSRGLVLPGYKYLGPFNGLDKGEPVNEADAAALEHDKAYDRQLDSGDNPYPKYNHADAEFQERLKEDTSFGGNLGRAVFQAKKRVLEPLGLVEEPVKTAPGKKRPVEHSPAEPDSSSGTGKAGQQPARKRLNFGQTGDADSVPDPQPLGQPPAAPSGLGTNTMATGSGAPMADNNEGADGVGNSSGNWHCDSTWMGDRVITTSTRTWALPTYNNHLYKQISSQSGASNDNHYFGYSTPWGYFDFNRFHCHFSPRDWQRLINNNWGFRPKRLNFKLFNIQVKEVTQNDGTTTIANNLTSTVQVFTDSEYQLPYVLGSAHQGCLPPFPADVFMVPQYGYLTLNNGSQAVGRSSFYCLEYFPSQMLRTGNNFTFSYTFEDVPFHSSYAHSQSLDRLMNPLIDQYLYYLSRTNTPSGTTTQSRLQFSQAGASDIRDQSRNWLPGPCYRQQRVSKTSADNNNSEYSWTGATKYHLNGRDSLVNPGPAMASHKDDEEKFFPQSGVLIFGKQDSGKTNVDIEKVMITDEEEIRTTNPVATEQYGSVSTNLQSGNTQAATSDVNTQGVLPGMVWQDRDVYLQGPIWAKIPHTDGHFHPSPLMGGFGLKHPPPQILIKNTPVPANPSTTFSAAKFASFITQYSTGQVSVEIEWELQKENSKRWNPEIQYTSNYNKSVNVDFTVDTNGVYSEPRPIGTRYLTRNL

SEQ ID NO: 680 - DNA, 2208 bp, unidentified
  source 1..2208: mol_type = unassigned DNA; note = Adeno-associated virus
atggctgccgatggttatcttccagattggctcgaggacactctctctgaaggaataagacagtggtggaagctcaaacctggcccaccaccaccaaagcccgcagagcggcataaggacgacagcaggggtcttgtgcttcctgggtacaagtaccttggacccttcaacggactcgacaagggagagccggtcaacgaggcagacgccgcggccctcgagcacgacaaggcctacgaccggcagctcgacggcggagacaacccgtacctcaagtacaaccacgccgacgcggagttccaggagcgtcttaaagaagatacgtcttttgggggcaacctcggacgagcagtcttccaggcgaaaaagagggttcttgaacctctgggcctggttgaggaacctgttaagacggctccgggaaaaaagaggccggtagagcactctcttgcggagccagactcctcctcgggaaccggaaaagcgggccagcagcctgcaagaaggagattgaatttcggtcagactggagacgcagactccgtacctgacccccagcctctcggacagccaccagcagccccctctggtctgggaactaatacgatggctacaggcagtggcgcaccaatggcagacaataacgagggcgccgacggagtgggtaattcctcgggaaattggcattgcgattccacatggatgggcgacagagtcatcaccaccagcacccgcacctgggctctgcccacctacaacaaccacctctacaggcagatttccagccaatcaggagcctcaaacgacaaccactactttggctacagcaccccttgggggtattttgacttcaacagattccactgccacttttcgccacgtgactggcaaagactcatcaacaacaattggggatcccggcccaaaagactcaacttcaagctctttaacattcaagtcaaggaggtcacgcagaatgacggtacgacgacgattgccaataaccttaccagcacggttcaggtgtttactgactcggagtaccagctcccgtacgtcctcggctcggcgcatcaaggatgcctcccgccgttcccagcagacgtcttcatggtgccacagtatggatacctcaccctgaacaacgggagtcaggcagtaggacgctcttcattttactgcctggagtactttccttctcagatgctgcgtaccggaaacaactttaccttcagctacacctttgaggacgttcctttccacagcagctacgcccacagccagagtttggaccgtctcatgaatcctctcgtcgaccagtacctgtattacttgagcagaacaaacactccaagcggaaccaccacgcagtcaaggcttcagttttctcaggccggagcaagtgacattcgggaccagtctaggaactggcttcctggaccctgttaccgccagcagcgagtatcaaagacatctgcggataacaacaacagtgaatactcgtggactggagctaccaagtaccaccttaatggaagagactctctggtgaatccgggcccggccatggccagccacaaggacgatgaagaaaagttttttcctcagagcggggttctcatctttggaaaacaagactcgggaaaaactaatgtggacattgaaaaggtcatgattacagacgaagaggaaatcaggaccaccaatcccgtggctacggagcagtatggttctgtatctaccaacctccagagcggcaacacacaagcagctacctcagatgtcaacacacaaggcgttcttccaggcatggtgtggcaggacagagacgtgtacctgcaggggcccatctgggcaaagattccacacacggacggacattttcacccctctcccctcatgggcggattcggacttaaacaccctcccccgcagattctcatcaagaacaccccggtacctgcgaatccttcgactaccttcagtgcggcaaagtttgcttccttcattacacagtactccacggggcaggtcagcgtggagatcgagtgggagctgcagaaggagaacagcaaacgctggaatcccgagattcagtacacttccaactacaacaaatctgttaatgtggactttactgtggacactaatggtgtgtattcagagcctcgccccattggcaccagatacctgactcgtaatctgtaa

SEQ ID NO: 681 - protein, 735 aa, unidentified
  source 1..735: note = Adeno-associated virus
MAADGYLPDWLEDTLSEGIRQWWKLKPGPPPPKPAERHKDDSRGLVLPGYKYLGPFNGLDKGEPVNEADAAALEHDKAYDRQLDGGDNPYLKYNHADAEFQERLKEDTSFGGNLGRAVFQAKKRVLEPLGLVEEPVKTAPGKKRPVEHSLAEPDSSSGTGKAGQQPARRRLNFGQTGDADSVPDPQPLGQPPAAPSGLGTNTMATGSGAPMADNNEGADGVGNSSGNWHCDSTWMGDRVITTSTRTWALPTYNNHLYRQISSQSGASNDNHYFGYSTPWGYFDFNRFHCHFSPRDWQRLINNNWGSRPKRLNFKLFNIQVKEVTQNDGTTTIANNLTSTVQVFTDSEYQLPYVLGSAHQGCLPPFPADVFMVPQYGYLTLNNGSQAVGRSSFYCLEYFPSQMLRTGNNFTFSYTFEDVPFHSSYAHSQSLDRLMNPLVDQYLYYLSRTNTPSGTTTQSRLQFSQAGASDIRDQSRNWLPGPCYRQQRVSKTSADNNNSEYSWTGATKYHLNGRDSLVNPGPAMASHKDDEEKFFPQSGVLIFGKQDSGKTNVDIEKVMITDEEEIRTTNPVATEQYGSVSTNLQSGNTQAATSDVNTQGVLPGMVWQDRDVYLQGPIWAKIPHTDGHFHPSPLMGGFGLKHPPPQILIKNTPVPANPSTTFSAAKFASFITQYSTGQVSVEIEWELQKENSKRWNPEIQYTSNYNKSVNVDFTVDTNGVYSEPRPIGTRYLTRNL

SEQ ID NO: 682 - protein, 738 aa, unidentified
  source 1..738: note = Adeno-associated virus
MAADGYLPDWLEDNLSEGIREWWDLKPGAPKPKANQQKQDDGRGLVLPGYKYLGPFNGLDKGEPVNAADAAALEHDKAYDQQLKAGDNPYLRYNHADAEFQERLQEDTSFGGNLGRAVFQAKKRVLEPLGLVEEAAKTAPGKKRPVEPSPQRSPDSSAGIGKKGQQPAKKRLNFGQTGDSESVPDPQPIGEPPAGPSGLGSGTMAAGGGAPMADNNEGADGVGSSSGNWHCDSTWLGDRVITTSTRTWALPTYNNHLYKQISNGTSGGSTNDNTYFGYSTPWGYFDFNRFHCHFSPRDWQRLINNNWGFRPKRLSFKLFNIQVKEVTQNEGTETIANNLTSTIQVFTDSEYQLPYVLGSAHQGCLPPFPADVFMIPQYGYLTLNNGSQAVGRSSFYCLEYFPSQMLRTGNNFEFSYTFEDVPFHSSCAHSQSSDRLMNPLIDQYLYYLSRTRSTGGTQGTQQLLFSQAGPANMSAQAKNWLPGPCYRQQRVSTTLSQNNNSNFAWTGATKYHLNGRDSLVNPGVAMATHKDDEERFFPSSGVLMFGKQGAGRDNVDYSSVMLTSEEEIKTTNPVATEQYGVVADNLQQTNTGPIVGNVNSQGALPGMVWQNRDVYLQGPIWAKIPHTDGNFHPSPLMGGFGLKHPPPQILIKNTPVPADPPTTFSQAKLASFITQYSTGQVSVEIEWELQKENSKRWNPEIQYTSNYYKSTNVDFAVNTEGTYSEPRPIGTRYLTRNL

SEQ ID NO: 683 - DNA, 2217 bp, unidentified
  source 1..2217: mol_type = unassigned DNA; note = Adeno-associated virus
atggctgctgacggttatcttccagattggctcgaggacaacctctctgagggcattcgcgagtggtgggacctgaaacctggagcccccaagcccaaggccaaccagcagaagcaggacgacggccggggtctggtgcttcttggctacaagtacctcggacccttcaacggactcgacaagggggagcccgtcaatgcggcggacgcagcggccctcgagcacgacaaggcctacgaccagcagctcaaagcgggtgacaatccgtacctgcggtataaccacgccgacgccgagtttcaggagcgtctgcaagaagatacgtcttttgggggcaacctcgggcgagcagtcttccaggccaagaagcgggttctcgaacctctcggtctggttgaggaagctgctaagacggctcctggaaagaagagaccggtagaaccgtcacctcagcgttcccccgactcctccacgggcatcggcaagaaaggccagcagcccgctaaaaagagactgaactttggtcagactggcgactcagagtcagtccccgaccctcaaccaatcggagaaccaccagcaggcccctctggtctgggatctggtacaatggctgcaggcggtggcgctccaatggcagacaataacgaaggcgccgacggagtgggtagttcctcaggaaattggcattgcgattccacatggctgggcgacagagtcatcaccaccagcacccgaacctgggccctgcccacctacaacaaccacctctacaagcaaatatccaatgggacatcgggaggaagcaccaacgacaacacctacttcggctacagcaccccctgggggtattttgacttcaacagattccactgccacttctcaccacgtgactggcagcgactcatcaacaacaactggggattccggccaaaaagactcagcttcaagctcttcaacatccaggtcaaggaggtcacgcagaatgaaggcaccaagaccatcgccaataaccttaccagcacgattcaggtatttacggactcggaataccagctgccgtacgtcctcggctccgcgcaccagggctgcctgcctccgttcccggcggacgtcttcatgattccccagtacggctaccttacactgaacaatggaagtcaagccgtaggccgttcctccttctactgcctggaatattttccatctcaaatgctgcgaactggaaacaattttgaattcagctacaccttcgaggacgtgcctttccacagcggctacgcacacagccagagcttggaccgactgatgaatcctctcatcgaccagtacctgtactacttatccagaactcagtccacaggaggaactcaaggtacccagcaattgttattttctcaagctgggcctgcaaacatgtcggctcaggctaagaactggctacctggaccttgctaccggcagcagcgagtctctacgacactgtcgcaaaacaacaacagcaactttgcttggactggtgccaccaaatatcacctgaacggaagagactctttggtaaatcccggtgtcgccatggcaacccacaaggacgacgaggaacgcttcttcccgtcgagtggagtcctgatgtttggaaaacagggtgctggaagagacaatgtggactacagcagcgttatgctaaccagcgaagaagaaattaaaaccactaaccctgtagccacagaacaatacggtgtggtggctgacaacttgcagcaaaccaatacagggcctattgtgggaaatgtcaacagccaaggagccttacctggcatggtctggcagaaccgagacgtgtacctgcagggtcccatctgggccaagattcctcacacggacggcaacttccacccttcaccgctaatgggaggatttggactgaagcacccacctcctcagatcctgatcaagaacacgccggtacctgcggatcctccaacgacgttcagccaggcgaaattggcttccttcattacgcagtacagcaccggacaggtcagcgtggaaatcgagtgggagctgcagaaggagaacagcaaacgctggaacccagagattcagtacacttcaaactactacaaatctacaaatgtggactttgctgtcaatacagagggaacttattctgagcctcgccccattggtactcgttacctcacccgtaatctgtaa

SEQ ID NO: 684 - protein, 738 aa, unidentified
  source 1..738: note = Adeno-associated virus
MAADGYLPDWLEDNLSEGIREWWDLKPGAPKPKANQQKQDDGRGLVLLGYKYLGPFNGLDKGEPVNAADAAALEHDKAYDQQLKAGDNPYLRYNHADAEFQERLQEDTSFGGNLGRAVFQAKKRVLEPLGLVEEAAKTAPGKKRPVEPSPQRSPDSSTGIGKKGQQPAKKRLNFGQTGDSESVPDPQPIGEPPAGPSGLGSGTMAAGGGAPMADNNEGADGVGSSSGNWHCDSTWLGDRVITTSTRTWALPTYNNHLYKQISNGTSGGSTNDNTYFGYSTPWGYFDFNRFHCHFSPRDWQRLINNNWGFRPKRLSFKLFNIQVKEVTQNEGTKTIANNLTSTIQVFTDSEYQLPYVLGSAHQGCLPPFPADVFMIPQYGYLTLNNGSQAVGRSSFYCLEYFPSQMLRTGNNFEFSYTFEDVPFHSGYAHSQSLDRLMNPLIDQYLYYLSRTQSTGGTQGTQQLLFSQAGPANMSAQAKNWLPGPCYRQQRVSTTLSQNNNSNFAWTGATKYHLNGRDSLVNPGVAMATHKDDEERFFPSSGVLMFGKQGAGRDNVDYSSVMLTSEEEIKTTNPVATEQYGVVADNLQQTNTGPIVGNVNSQGALPGMVWQNRDVYLQGPIWAKIPHTDGNFHPSPLMGGFGLKHPPPQILIKNTPVPADPPTTFSQAKLASFITQYSTGQVSVEIEWELQKENSKRWNPEIQYTSNYYKSTNVDFAVNTEGTYSEPRPIGTRYLTRNL

SEQ ID NO: 685 - protein, 735 aa, unidentified
  source 1..735: note = Adeno-associated virus
MAADGYLPDWLEDTLSEGIRQWWKLKPGPPPPKPAERHKDDSRGLVLPGYKYLGPFNGLDKGEPVNEADAAALEHDKAYDRQLDSGDNPYLKYNHADAEFQERLKEDTSFGGNLGRAVFQAKKRVLEPLGLVEPPVKTAPGKKRPVEHSPAEPDSSSGTGKAGQQPARKRLNFGQTGDADSVPDPQPLGQPPAAPSGLGSTTMATGSGAPMADNNEGADGVGNSSGNWHCDSQWLGDRVITTSTRTWALPTYNNHLYKQISSQSGASNDNHYFGYSTPWGYFDFNRFHCHFSPRDWQRLINNNWGFRPKRLNFKLFNIQVKEVTQNDGTTTIANNLTSTVQVFTDSEYQLPYVLGSAHQGCLPPFPADVFMVPQYGYLTLNNGSQAVGRSSFYCLEYFPSQMLRTGNNFQFSYTFEDVPFHSSYAHSQSLDRLMNPLIDQYLYYLNKTQSNSGTLQQSRLLFSQAGPTSMSLQAKNWLPGPCYRQQRLSKQANDNNNSNFPWTAATKYHLNGRDSLVNPGPAMASHKDDEEKFFPMHGTLIFGKQGTNANDADLDNVMITDEEEIRTTNPVATEQYGYVSNNLQNSNTGPTTGTVNHQGALPGMVWQDRDVYLQGPIWAKIPHTDGHFHPSPLMGGFGLKHPPPQIMIKNTPVPANPPTNFSSAKFASFITQYSTGQVSVEIEWELQKENSKRWNPEIQYTSNYNKSVNVDFTVDTNGVYSEPRPIGTRYLTRNL

SEQ ID NO: 686 - protein, 735 aa, unidentified
  source 1..735: note = Adeno-associated virus
MAADGYLPDWLEDTLSEGIRQWWKLKPGPPPPKPAERHKDDSRGLVLPGYKYLGPFNGLDKGEPVNEADAAALEHDKAYDRQLDSGDNPYLKYNHADAEFQERLKEDTSFGGNLGRAVFQAKKRVLEPLGLVEGPVKTAPGKKRPVEHSPAEPDSSSGTGKAGQQPARKRLNFGQTGDADSVPDPQPLGQPPAAPSGLGSTTMATGSGAPMADNNEGADGVGNSSGNWHCDSQWLGDRVITTSTRTWALPTYNNHLYKQISSQSGASNDNHYFGYSTPWGYFDFNRFHCHFSPRDWQRLINNNWGFRPKRLNFKLFNIQVKEVTQNDGTTTIANNLTSTVQVFTDSEYQLPYVLGSAHQGCLPPFPADVFMVPQYGYLTLNNGSQAVGRSSFYCLEYFPSQMLRTGNNFQFSYTFEDVPFHSSYAHSQSLDRLMNPLIDQYLYYLNKTQSNSGTLQQSRLLFSQAGPTSMSLQAKNWLPGPCYRQQRLSKQANDNNNSNFPWTAATKYHLNGRDSLVNPGPAMASHKDDEEKFFPMHGTLIFGKQGTNANDADLDNVMITDEEEIRTTNPVATEQYGYVSNNLQNSNTGPTTGTVNHQGALPGMVWQDRDVYLQGPIWAKIPHTDGHFHPSPLMGGFGLKHPPPQIMIKNTPVPANPPTNFSSAKFASFITQYSTGQVSVEIEWELQKENSKRWNPEIQYTSNYNKSVNVDFTVDTNGVYSEPRPIGTRYLTRNL

SEQ ID NO: 687 - DNA, 2208 bp, unidentified
  source 1..2208: mol_type = unassigned DNA; note = Adeno-associated virus
atggctgccgatggttatcttccagattggctcgaggacactctctctgaaggaataagacagtggtggaagctcaaacctggcccaccaccaccaaagcccgcagagcggcataaggacgacagcaggggtcttgtgcttcctgggtacaagtacctcggacccttcaacggactcgacaagggggagccggtcaacgaggcagacgccgcggccctcgagcacgacaaggcctacgaccggcagctcgacagcggagacaacccgtacctcaagtacaaccacgccgacgcggagtttcaggagcgtcttaaagaagatacgtcttttgggggcaacctcggacgagcagtcttccaggcgaaaaagagggttcttgaacctctgggcctggttgagggacctgttaagacggctccgggaaaaaagaggccggtagagcactctcctgcggagccagactcctcctcgggaaccggaaaagcgggccagcagcctgcaagaaaaagattgaattttggtcagactggagacgcagactccgtacctgacccccagcctctcggacagccaccagcagccccctctggtttgggatctactacaatggctacaggcagtggcgcaccaatggcagacaataacgagggtgccgatggagtgggtaattcctcaggaaattggcattgcgattcccaatggctgggcgacagagtcatcaccaccagcacccgaacctgggccctgcccacctacaacaaccacctctacaagcaaatctcaagccaatcaggagcctcaaacgacaaccactactttggctacagcaccccttgggggtattttgacttcaacagattccactgccacttttcaccacgtgactggcaaagactcatcaacaacaactggggattccgacccaagagactcaacttcaagctctttaacattcaagtcaaagaggtcacgcagaatgacggtacgacgacgattgccaataaccttaccagcacggttcaggtgtttactgactcggagtaccagctcccgtacgtcctcgggtcggcgcatcaaggatgcctcccgccgtttccagcggacgtcttcatggtcccacagtatggatacctcaccctgaacaacgggagtcaggcggtaggacgctcttccttttactgcctggagtactttccttctcagatgcttcgtactggaaacaactttcagttcagctacacctttgaagacgttcctttccacagcagctacgctcacagccagagtctggatcggctgatgaatcctctgatcgaccagtacctgtattatctgaacaaaacacaatcaaatagtggaactcttcagcagtctcggctactgtttagtcaagctggacccaccagcatgtctcttcaagctaaaaactggctacctggaccttgctacagacagcagcgtctgtcaaagcaggcaaacgacaacaacaacagcaactttccctggactgcggctacaaagtatcacctaaatggccgggactcgttggttaatccaggaccagctatggccagtcacaaagacgatgaagaaaagtttttccccatgcatggaaccctgatatttggtaaacaaggaacaaatgctaacgacgcggatttggacaatgtcatgattacagatgaagaagaaatccgcaccaccaatcccgtggctacggagcagtacggatatgtgtcaaataatttgcaaaactcaaatactggtccaactactggaactgtcaatcaccaaggagcgttacctggcatggtgtggcaggatcgagacgtgtacctgcagggacccatttgggccaagattcctcacaccgatggacactttcatccttctccactgatgggaggttttgggctcaaacacccgcctcctcagatcatgatcaaaaacactcccgttccagccaatcctcccacaaacttcagttctgccaagtttgcttctttcatcacacagtattccacggggcaggtcagcgtggagatcgagtgggagctgcagaaagagaacagcaaacgctggaatcccgaaattcagtacacttccaactacaacaaatctgttaatgtggactttactgtggacactaatggcgtgtattcagagcctcgccccattggcaccagatacctgactcgtaatctgtaa

SEQ ID NO: 688 - DNA, 2211 bp, unidentified; identical to SEQ ID NO: 369
  source 1..2211: mol_type = unassigned DNA; note = Adeno-associated virus

SEQ ID NO: 689 - DNA, 2208 bp, unidentified
  source 1..2208: mol_type = unassigned DNA; note = Adeno-associated virus
atggctgccgatggttatcttccagattggctcgaggacactctctctgaaggaacaagacagtggtggaagctcaaacctggcccaccaccaccaaagcccgcagagcggcataaggacgacagcaggggtcttgtgcttcctgggtacaagtacctcggacccttcaacggactcgacaagggggagccggtcaacgaggcagacgccgcggccctcgagcacgacaaggcctacgaccggcagctcgacagcggagacaacccgtacctcaagtacaaccacgccgacgcggagtttcaggagcgtcttaaagaagatacgtcttttgggggcaacctcggacgagcagtcttccaggcgaaaaagagggttcttgaacctctgggcctggttgaggaacctgttaagacggctccgggaaaaaagaggccggtagagcactctcctgcggagccagactcctcctcgggaaccggaaaagcgggccagcagcctgcaagaaaaagattgaattttggtcagactggagacgcagactccgtacctgacccccagcctctcggacagccaccagcagccccctctggtttgggatctactacaatggctacaggcagtggcgcaccaatggcagacaataacgagggtgccgatggagtgggtaattcctcaggaaattggcattgcgattcccaatggctgggcgacagagtcatcaccaccagcacccgaacctgggccctgcccacctacaacaaccacctctacaagcaaatctcaagccaatcaggagcctcaaacgacaaccactactttggctacagcaccccttgggggtattttgacttcaacagattccactgccacttttcaccacgtgactggcaaagactcatcaacaacaactggggattccgacccaagagactcaacttcaagctctttaacattcaagtcaaagaggtcacgcagaatgacggtacgacgacgattgccaataaccttaccagcacggttcaggtgtttactgactcggagtaccagctcccgtacgtcctcgggtcggcgcatcaaggatgcctcccgccgtttccagcggacgtcttcatggtcccacagtatggatacctcaccctgaacaacgggagtcaggcggtaggacgctcttccttttactgcctggagtactttccttctcagatgcttcgtactggaaacaactttcagttcagctacacctttgaagacgttcctttccacagcagctacgctcacagccagagtctggatcggctgatgaatcctctgatcgaccagtacctgtattatctgaacaaaacacaatcaaatagtggaactcttcagcagtctcggctactgtttagtcaagctggacccaccagcatgtctcttcaagctaaaaactggctacctggaccttgctacagacagcagcgtctgtcaaagcaggcaaacgacaacaacaacagcaactttccctggactgcggctacaaagtaccacctaaatggccgggactcgttggttaatccaggaccagctatggccagtcacaaagacgatgaagaaaagtttttccccatgcatggaaccctgatatttggtaaacaaggaacaaatgctaacgacgcggatttggacaatgtcatgattacagatgaagaagaaatccgcaccaccaatcccgtggctacggagcagtacggatatgtgtcaaataatttgcaaaactcaaatactggtccaactactggaactgtcaatcaccaaggagcgttacctggcatggtgtggcaggatcgagacgtgtacctgcagggacccatttgggccaagattcctcacaccgatggacactttcatccttctccactgatgggaggttttgggctcaaacacccgcctcctcagatcatgatcaaaaacactcccgttccagccaatcctcccacaaacttcagttctgccaagtttgcttctttcatcacacagtattccacggggcaggtcagcgtggagatcgagtgggagctgcagaaagagaacagcaaacgctggaatcccgaaattcagtacacttccaactacaacaaatctgttaatgtggactttactgtggacactaatggcgtgtattcagagcctcgccccattggcaccagatacctgactcgtaatctgtaa

SEQ ID NO: 690 - DNA, 2217 bp, unidentified
  source 1..2217: mol_type = unassigned DNA; note = Adeno-associated virus
atggctgctgacggttatcttccagattggctcgaggacaacctctctgagggcattcgcgagtggtgggacctgaaacctggagcccccaagcccaaggccaaccagcagaagcaggacgacggccggggtctggtgcttcctggctacaagtacctcggacccttcaacggactcgacaagggggagcccgtcaacgcggcggacgcagcggccctcgagcacgacaaggcctacgaccagcagctcaaagcgggtgacaatccgtacctgcggtataaccacgccgacgccgagtttcaggagcgtctgcaagaagatacgtcttttgggggcaacctcgggcgagcagtcttccaggccaagaagcgggttctcgaacctctcggtctggttgaggaagctgctaagacggctcctggaaagaagagaccggtagaaccgtcacctcagcgttcccccgactcctccacgggcatcggcaagaaaggccagcagcccgctaaaaagagactgaactttggtcagactggcgactcagagtcagtccccgaccctcaaccaatcggagaaccacctgcaggcccctctggtctgggatctggtacaatggctgcaggcggtggcgctccaatggcagacaataacgaaggcgccgacggagtgggtagttcctcaggaaattggcattgcgattccacatggctgggcgacagagtcatcaccaccagcacccgaacctgggccctgcccacctacaacaaccacctctacaagcaaatatccaatgggacatcgggagggagcaccaacgacaacacctacttcggctacagcaccccctgggggtattttgacttcaacagattccactgccacttctcaccacgtgactggcagcgactcatcaacaacaactggggattccggccaaaaagactcagcttcaagctcttcaacatccaggtcaaggaggtcacgcagaatgaaggcaccaagaccatcgccaataaccttaccagcacgattcaggtatttacggactcggaataccagctgccgtacgtcctcggctccgcgcaccagggctgcctgcctccgttcccggcggacgtcttcatgattccccagtacggctaccttacactgaacaatggaagtcaagccgtaggccgttcctccttctactgcctggaatattttccatctcaaatgctgcgaactggaaacaattttgaattcagctacaccttcgaggacgtgcctttccacagcagctacgcacacagccagagcttggaccgactgatgaatcctctcatcgaccagtacctgtactacttatccagaactcagtccacaggaggaactcaaggtacccagcaattgttattttctcaagctgggcctgcaaacatgtcggctcaggctaagaactggctacctggaccttgctaccggcagcagcgagtctctacgacactgtcgcaaaacaacaacagcaactttgcttggactggtgccaccaaatatcacctgaacggaagagactctttggtaaatcccggtgtcgccatggcaacccacaaggacgacgaggaacgcttcttcccgtcgagtggagtcctgatgtttggaaaacagggtgctggaagagacaatgtggactacagcagcgttatgctaaccagcgaagaagaaattaaaaccactaaccctgtagccacagaacaatacggtgtggtggctgacaacttgcagcaaaccaatacagggcctattgtgggaaatgtcaacagccaaggagccttacctggcatggtctggcagaaccgagacgtgtacctgcagggtcccatctgggccaagattcctcacacggacggcaactgccacccttcaccgctaatgggaggatttggactgaagcacccacctcctcagatcctgatcaagaacacgccggtacctgcggatcctccaacaacgttcagccaggcgaaattggcttccttcattacgcagtacagcaccggacaggtcagcgtggaaatcgagtgggagctgcagaaggagaacagcaaacgctggaacccagagattcagtacacttcaaactactacaaatctacaaatgtggactttgctgtcaatacagagggaacttattctgagcctcgccccattggtactcgttacctcacccgtaatctgtaa

SEQ ID NO: 691 - protein, 735 aa, unidentified
  source 1..735: note = Adeno-associated virus
MAADGYLPDWLEDTLSEGTRQWWKLKPGPPPPKPAERHKDDSRGLVLPGYKYLGPFNGLDKGEPVNEADAAALEHDKAYDRQLDSGDNPYLKYNHADAEFQERLKEDTSFGGNLGRAVFQAKKRVLEPLGLVEEPVKTAPGKKRPVEHSPAEPDSSSGTGKAGQQPARKRLNFGQTGDADSVPDPQPLGQPPAAPSGLGSTTMATGSGAPMADNNEGADGVGNSSGNWHCDSQWLGDRVITTSTRTWALPTYNNHLYKQISSQSGASNDNHYFGYSTPWGYFDFNRFHCHFSPRDWQRLINNNWGFRPKRLNFKLFNIQVKEVTQNDGTTTIANNLTSTVQVFTDSEYQLPYVLGSAHQGCLPPFPADVFMVPQYGYLTLNNGSQAVGRSSFYCLEYFPSQMLRTGNNFQFSYTFEDVPFHSSYAHSQSLDRLMNPLIDQYLYYLNKTQSNSGTLQQSRLLFSQAGPTSMSLQAKNWLPGPCYRQQRLSKQANDNNNSNFPWTAATKYHLNGRDSLVNPGPAMASHKDDEEKFFPMHGTLIFGKQGTNANDADLDNVMITDEEEIRTTNPVATEQYGYVSNNLQNSNTGPTTGTVNHQGALPGMVWQDRDVYLQGPIWAKIPHTDGHFHPSPLMGGFGLKHPPPQIMIKNTPVPANPPTNFSSAKFASFITQYSTGQVSVEIEWELQKENSKRWNPEIQYTSNYNKSVNVDFTVDTNGVYSEPRPIGTRYLTRNL

SEQ ID NO: 692 - DNA, 2208 bp, unidentified
  source 1..2208: mol_type = unassigned DNA; note = Adeno-associated virus
atggctgccgatggttatcttccagattggctcgaggacactctctctgaaggaataagacagtggtggaagctcaaacctggcccaccaccaccaaagcccgcagagcggcatcaggacaacagcaggggtcttgtgcttcctgggtacaagtacctcggaccctccaacggactcgacaaaggagagccggtcaacgaggcagacgccgcggccctcgagcacgacaaggcctacgaccggcagctcgacagcggagacaacccgtacctcaagtacaaccacgccgacgcggagtttcaggagcgtcttaaagaagatacgtcttttgggggcaacctcggacgagcagtcttccaggcgaaaaagagggttcttgaacctctgggcctggttgaggaacctgttaagacggctccgggaaaaaagaggccggtagagcactctcctgtggagccagactcctcctcgggaaccggaaaagcgggccatcagcctgcgagaaagagattgaattttggtcagactggagacgcagactccgtacctgacccccagcctctcggacagccaccagcagcccccacaagtttgggatctactacaatggctacaggcagtggcgcaccaatggcagacaataacgagggtgccgatggagtgggtaattcctcaggaaattggcattgcgattcccaatggctgggcgacagagtcatcaccaccagcacccgaacctgggccctgcccacctacaacaaccacctctacaagcaaatctccagccaatcaggagcctcgaacgacaaccactactttggctgcagcaccccctgggggtattttgacttcaacagattccactgtcacttctccccacgtgattggcaaagactcatcaacaacaactggggattccgacccaagagactcaacttcaagctctttaacattcaagtcaaagaggtcacgcagaatgacggtacgacgacgattgccaataaccttaccagcacggttcaggtgtttactgactcggagtacccgctcccgtacgtcctcggctcggcgcatcaaggatgcctcccgccgtttccagcggacgtcttcatggtcccacagtatggatacctcaccctgaacaacgggagtcaggcggtaggacgctcttccttttactgcctggagtactttccttctcagatgctgcgtaccggaaacaactttaccttcagctacacctttgaggacgttcctttccacagcagctacgctcacagccagagtttggaccggctgatgaatcctctgatcgaccagtatctatattatctgaacaggacacaatcaaatagtggaactcttcagcagtctaggctactgtttagccaagctggacccaccagcatgtctcttcaagctaaaaactggctgcctggaccttgctacagacagcagcgtctttcaaagcaggcaaacgacaacaacaacagcaactttccctggactgcggctacaaagtatcatctaaatggccgggactcgttggttaatccaggaccagctatggccagccacaaagacgatgaagaaaagtttttccccatgcatggaaccctgatatttggtaaacaaggaacaaatgctaacgacgcggatttggagcatgttatgattacagatgaagaagaaatcaggaccaccaatcctgtggctacagagcagtacggaaacgtgtcaaataatttgcaaaactcaaatactggtccaactacagaaaatgtcaatcaccagggagcgttacctggtatggtgtggcaggatcgagacgtgtacctgcagggacccatttgggccaagattcctcacaccgacggacactttcacccttctccactgatgggaggttttggactcaaacacccgcctcctcaaatcatgatcaaaaacactcccgttccagccaatcctcccacaaacttcagttctgccaagtttgcttctttcatcacacagtattccacgggccaggtcagcgtggagattgagtgggagctgcagaaggagaacagcaaacgctggaaccccgagatccagtatacttccaactacaacaaatctgttaatgtggactttactgtggacactaatggtgtgtattcagagccttgccccattggcaccagatacctgactcgtaatctgtaa

SEQ ID NO: 693 - protein, 735 aa, unidentified
  source 1..735: note = Adeno-associated virus
MAADGYLPDWLEDTLSEGIRQWWKLKPGPPPPKPAERHQDNSRGLVLPGYKYLGPSNGLDKGEPVNEADAAALEHDKAYDRQLDSGDNPYLKYNHADAEFQERLKEDTSFGGNLGRAVFQAKKRVLEPLGLVEEPVKTAPGKKRPVEHSPVEPDSSSGTGKAGHQPARKRLNFGQTGDADSVPDPQPLGQPPAAPTSLGSTTMATGSGAPMADNNEGADGVGNSSGNWHCDSQWLGDRVITTSTRTWALPTYNNHLYKQISSQSGASNDNHYFGCSTPWGYFDFNRFHCHFSPRDWQRLINNNWGFRPKRLNFKLFNIQVKEVTQNDGTTTIANNLTSTVQVFTDSEYPLPYVLGSAHQGCLPPFPADVFMVPQYGYLTLNNGSQAVGRSSFYCLEYFPSQMLRTGNNFTFSYTFEDVPFHSSYAHSQSLDRLMNPLIDQYLYYLNRTQSNSGTLQQSRLLFSQAGPTSMSLQAKNWLPGPCYRQQRLSKQANDNNNSNFPWTAATKYHLNGRDSLVNPGPAMASHKDDEEKFFPMHGTLIFGKQGTNANDADLEHVMITDEEEIRTTNPVATEQYGNVSNNLQNSNTGPTTENVNHQGALPGMVWQDRDVYLQGPIWAKIPHTDGHFHPSPLMGGFGLKHPPPQIMIKNTPVPANPPTNFSSAKFASFITQYSTGQVSVEIEWELQKENSKRWNPEIQYTSNYNKSVNVDFTVDTNGVYSEPCPIGTRYLTRNL

SEQ ID NO: 694 - DNA, 2214 bp, synthetic construct
  source 1..2214: mol_type = other DNA; note = Description of Artificial Sequence: Synthetic polynucleotide
atggctgccgatggttatcttccagattggctcgaggacaaccttagtgaaggaattcgcgagtggtgggctttgaaacctggagcccctcaacccaaggcaaatcaacaacatcaagacaacgctcgaggtcttgtgcttccgggttacaaataccttggacccggcaacggactcgacaagggggagccggtcaacgcagcagacgcggcggccctcgagcacgacaaggcctacgaccagcagctgcaggcgggtgacaatccgtacctgcggtataaccacgccgacgccgagtttcaggagcgtctgcaagaagatacgtcttttgggggcaaccttggcagagcagtcttccaggccaaaaagaggatccttgagcctcttggtctggttgaggaagcagctaaaacggctcctggaaagaagaggcctgtagatcagtctcctcaggaaccggactcatcatctggtgttggcaaatcgggcaaacagcctgccagaaaaagactaaatttcggtcagactggcgactcagagtcagtcccagaccctcaacctctcggagaaccaccagcagcccccacaagtttgggatctaatacaatggcttcaggcggtggcgcaccaatggcagacaataacgagggtgccgatggggtgggtagttcctcgggaaattggcattgcgattcccaatggctgggggacagagtcatcaccaccagcacccgaacctgggccctgcccacctacaacaatcacctctacaagcaaatctccaacgggacatcgggaggagccaccaacgacaacacctacttcggctacagcaccccctgggggtattttgactttaacagattccactgccacttttcaccacgtgactggcagcgactcatcaacaacaactggggattccggcccaagagactcagcttcaagctcttcaacatccaggtcaaggaggtcacgcagaatgaaggcaccaagaccatcgccaataacctcaccagcaccatccaggtgtttacggactcggagtaccagctgccgtacgttctcggctctgcgcaccagggctgcctccctccgttcccggcggacgtgttcatgattccgcaatacggctacctgacgctcaacaatggcagccaagccgtgggacgttcatccttttactgcctggaatatttcccttctcagatgctgagaacgggcaacaactttaccttcagctacacctttgaggaagtgcctttccacagcagctacgcgcacagccagagcttggaccggctgatgaatcctctgattgaccagtacctgtactacttgtctcggactcaaacaacaggaggcacggcaaatacgcagactctgggcttcagccaaggtgggcctaatacaatggccaatcaggcaaagaactggctgccaggaccctgttaccgccaacaacgcgtctcaacgacaaccgggcaaaacaacaatagcaactttgcctggactgctgggaccaaataccatctgaatggaagaaattcattggctaatcctggcatcgctatggcaacacacaaagacgacgaggagcgtttttttcccagtaacgggatcctgatttttggcaaacaaaatgctgccagagacaatgcggattacagcgatgtcatgctcaccagcgaggaagaaatcaaaaccactaaccctgtggctacagaggaatacggtatcgtggcagataacttgcagcagcaaaacacggctcctcaaattggaactgtcaacagccagggggccttacccggtatggtctggcagaaccgggacgtgtacctgcagggtcccatctgggccaagattcctcacacggacggcaacttccacccgtctccgctgatgggcggctttggcctgaaacatcctccgcctcagatcctgatcaagaacacgcctgtacctgcggatcctccgaccaccttcaaccagtcaaagctgaactctttcatcacgcaatacagcaccggacaggtcagcgtggagatcgagtgggagctgcagaaggaaaacagcaagcgctggaacccggagatccagtacacttccaactattacaagtctaataatgttgaatttgctgttaatactgaaggtgtatatagtgaaccccgccccattggcaccagatacctgactcgtaatctgtaa

SEQ ID NO: 695 - protein, 737 aa, synthetic construct
  source 1..737: note = Description of Artificial Sequence: Synthetic polypeptide
MAADGYLPDWLEDNLSEGIREWWALKPGAPQPKANQQHQDNARGLVLPGYKYLGPGNGLDKGEPVNAADAAALEHDKAYDQQLQAGDNPYLRYNHADAEFQERLQEDTSFGGNLGRAVFQAKKRILEPLGLVEEAAKTAPGKKRPVDQSPQEPDSSSGVGKSGKQPARKRLNFGQTGDSESVPDPQPLGEPPAAPTSLGSNTMASGGGAPMADNNEGADGVGSSSGNWHCDSQWLGDRVITTSTRTWALPTYNNHLYKQISNGTSGGATNDNTYFGYSTPWGYFDFNRFHCHFSPRDWQRLINNNWGFRPKRLSFKLFNIQVKEVTQNEGTKTIANNLTSTIQVFTDSEYQLPYVLGSAHQGCLPPFPADVFMIPQYGYLTLNNGSQAVGRSSFYCLEYFPSQMLRTGNNFTFSYTFEEVPFHSSYAHSQSLDRLMNPLIDQYLYYLSRTQTTGGTANTQTLGFSQGGPNTMANQAKNWLPGPCYRQQRVSTTTGQNNNSNFAWTAGTKYHLNGRNSLANPGIAMATHKDDEERFFPSNGILIFGKQNAARDNADYSDVMLTSEEEIKTTNPVATEEYGIVADNLQQQNTAPQIGTVNSQGALPGMVWQNRDVYLQGPIWAKIPHTDGNFHPSPLMGGFGLKHPPPQILIKNTPVPADPPTTFNQSKLNSFITQYSTGQVSVEIEWELQKENSKRWNPEIQYTSNYYKSNNVEFAVNTEGVYSEPRPIGTRYLTRNL

SEQ ID NO: 696 - DNA, 2211 bp, synthetic construct
  source 1..2211: mol_type = other DNA; note = Description of Artificial Sequence: Synthetic polynucleotide
atggctgccgatggttatcttccagattggctcgaggacaacctctctgagggcattcgcgagtggtgggacttgaaacctggagccccgaagcccaaagccaaccagcaaaagcaggacgacggccggggtctggtgcttcctggctacaagtacctcggacccttcaacggactcgacaagggggagcccgtcaacgcggcggacgcagcggccctcgagcacgacaaggcctacgaccagcagctcaaagcgggtgacaatccgtacctgcggtataaccacgccgacgccgagtttcaggagcgtctgcaagaagatacgtcttttgggggcaacctcgggcgagcagtcttccaggccaagaagcgggttctcgaacctctcggtctggttgaggaaggcgctaagacggctcctggaaagaaacgtccggtagagcagtcgccacaagagccagactcctcctcgggcatcggcaagacaggccagcagcccgctaaaaagagactcaattttggtcagactggcgactcagagtcagtccccgacccacaacctctcggagaacctccagcaacccccgctgctgtgggacctactacaatggcttcaggcggtggcgcaccaatggcagacaataacgaaggcgccgacggagtgggtaatgcctcaggaaattggcattgcgattccacatggctgggcgacagagtcatcaccaccagcacccgaacatgggccttgcccacctataacaaccacctctacaagcaaatctccagtgcttcaacgggggccagcaacgacaaccactacttcggctacagcaccccctgggggtattttgatttcaacagattccactgccatttctcaccacgtgactggcagcgactcatcaacaacaattggggattccggcccaagagactcaacttcaagctcttcaacatccaagtcaaggaggtcacgacgaatgatggcgtcacgaccatcgctaataaccttaccagcacggttcaagtcttctcggactcggagtaccagctgccgtacgttctcggctctgcccaccagggctgcctgcctccgttcccggcggacgtgttcatgattccccagtacggctacctaacactcaacaacggtagtcaggccgtgggacgctcctccttctactgcctggaatactttccttcgcagatgctgagaaccggcaacaacttccagtttacttacaccttcgaggacgtgcctttccacagcagctacgcccacagccagagcttggaccggctgatgaatcctctgattgaccagtacctgtactacttgtctcggactcaaacaacaggaggcacggcaaatacgcagactctgggcttcagccaaggtgggcctaatacaatggccaatcaggcaaagaactggctgccaggaccctgttaccgccaacaacgcgtctcaacgacaaccgggcaaaacaacaatagcaattttacctggactggtgcttcaaaatataacctcaatgggcgtgaatccatcatcaaccctggcactgctatggcctcacacaaagacgacgaagacaagttctttcccatgagcggtgtcatgatttttggaaaagagagcgccggagcttcaaacactgcattggacaatgtcatgattacagacgaagaggaaattaaagccactaaccctgtggccaccgaaagatttgggaccgtggcagtcaatttccagagcagcagcacagaccctgcgaccggagatgtgcatgctatgggagcattacctggcatggtgtggcaagatagagacgtgtacctgcagggtcccatttgggccaaaattcctcacacagatggacactttcacccgtctcctcttatgggcggctttggactcaagaacccgcctcctcagatcctcatcaaaaacacgcctgttcctgcgaatcctccggcggagttttcagctacaaagtttgcttcattcatcacccaatactccacaggacaagtgagtgtggaaattgaatgggagctgcagaaagaaaacagcaagcgctggaatcccgaagtgcagtacacatccaattatgcaaaatctgccaacgttgattttactgtggacaacaatggactttatactgagcctcgccccattggcacccgttacctcacccgtcccctgtaa

SEQ ID NO: 697 - protein, 736 aa, synthetic construct
  source 1..736: note = Description of Artificial Sequence: Synthetic polypeptide
MAADGYLPDWLEDNLSEGIREWWDLKPGAPKPKANQQKQDDGRGLVLPGYKYLGPFNGLDKGEPVNAADAAALEHDKAYDQQLKAGDNPYLRYNHADAEFQERLQEDTSFGGNLGRAVFQAKKRVLEPLGLVEEGAKTAPGKKRPVEQSPQEPDSSSGIGKTGQQPAKKRLNFGQTGDSESVPDPQPLGEPPATPAAVGPTTMASGGGAPMADNNEGADGVGNASGNWHCDSTWLGDRVITTSTRTWALPTYNNHLYKQISSASTGASNDNHYFGYSTPWGYFDFNRFHCHFSPRDWQRLINNNWGFRPKRLNFKLFNIQVKEVTTNDGVTTIANNLTSTVQVFSDSEYQLPYVLGSAHQGCLPPFPADVFMIPQYGYLTLNNGSQAVGRSSFYCLEYFPSQMLRTGNNFQFTYTFEDVPFHSSYAHSQSLDRLMNPLIDQYLYYLSRTQTTGGTANTQTLGFSQGGPNTMANQAKNWLPGPCYRQQRVSTTTGQNNNSNFTWTGASKYNLNGRESIINPGTAMASHKDDEDKFFPMSGVMIFGKESAGASNTALDNVMITDEEEIKATNPVATERFGTVAVNFQSSSTDPATGDVHAMGALPGMVWQDRDVYLQGPIWAKIPHTDGHFHPSPLMGGFGLKNPPPQILIKNTPVPANPPAEFSATKFASFITQYSTGQVSVEIEWELQKENSKRWNPEVQYTSNYAKSANVDFTVDNNGLYTEPRPIGTRYLTRPL

SEQ ID NO: 698 - DNA, 2211 bp, synthetic construct
  source 1..2211: mol_type = other DNA; note = Description of Artificial Sequence: Synthetic polynucleotide
atggctgctgacggttatcttccagattggctcgaggacaacctttctgaaggcattcgagagtggtgggcgctgcaacctggagcccctaaacccaaggcaaatcaacaacatcaggacaacgctcggggtcttgtgcttccgggttacaaatacctcggacccggcaacggactcgacaagggggaacccgtcaacgcagcggacgcggcagccctcgagcacgacaaggcctacgaccagcagctcaaggccggtgacaacccctacctcaagtacaaccacgccgacgccgagttccaggagcggctcaaagaagatacgtcttttgggggcaacctcgggcgagcagtcttccaggccaaaaagaggcttcttgaacctcttggtctggttgaggaagcggctaagacggctcctggaaagaagaggcctgtagatcagtctcctcaggaaccggactcatcatctggtgttggcaaatcgggcaaacagcctgccagaaaaagactaaatttcggtcagactggcgactcagagtcagtcccagaccctcaacctctcggagaaccaccagcagcccccacaagtttgggatctaatacaatggcttcaggcggtggcgcaccaatggcagacaataacgagggtgccgatggagtgggtaattcctcaggaaattggcattgcgattcccaatggctgggcgacagagtcatcaccaccagcaccagaacctgggccctgcccacttacaacaaccatctctacaagcaaatctccagccaatcaggagcttcaaacgacaaccactactttggctacagcaccccttgggggtattttgactttaacagattccactgccacttctcaccacgtgactggcagcgactcattaacaacaactggggattccggcccaagaaactcagcttcaagctcttcaacatccaagttaaagaggtcacgcagaacgatggcacgacgactattgccaataaccttaccagcacggttcaagtgtttacggactcggagtatcagctcccgtacgtgctcgggtcggcgcaccaaggctgtctcccgccgtttccagcggacgtcttcatggtccctcagtatggatacctcaccctgaacaacggaagtcaagcggtgggacgctcatccttttactgcctggagtacttcccttcgcagatgctaaggactggaaataacttccaattcagctataccttcgaggatgtaccttttcacagcagctacgctcacagccagagtttggatcgcttgatgaatcctcttattgatcagtatctgtactacctgaacagaacgcaaggaacaacctctggaacaaccaaccaatcacggctgctttttagccaggctgggcctcagtctatgtctttgcaggccagaaattggctacctgggccctgctaccggcaacagagactttcaaagactgctaacgacaacaacaacagtaactttccttggacagcggccagcaaatatcatctcaatggccgcgactcgctggtgaatccaggaccagctatggccagtcacaaggacgatgaagaaaaatttttccctatgcacggcaatctaatatttggcaaagaagggacaacggcaagtaacgcagaattagataatgtaatgattacggatgaagaagagattcgtaccaccaatcctgtggcaacagagcagtatggaactgtggcaaataacttgcagagctcaaatacagctcccacgactagaactgtcaatgatcagggggccttacctggcatggtgtggcaagatcgtgacgtgtaccttcaaggacctatctgggcaaagattcctcacacggatggacactttcatccttctcctctgatgggaggctttggactgaaacatccgcctcctcaaatcatgatcaaaaatactccggtaccggcaaatcctccgacgactttcagcccggccaagtttgcttcatttatcactcagtactccactggacaggtcagcgtggaaattgagtgggagctacagaaagaaaacagcaaacgttggaatccagagattcagtacacttccaactacaacaagtctgttaatgtggactttactgtagacactaatggtgtttatagtgaacctcgccccattggcacccgttaccttacccgtcccctgtaa

SEQ ID NO: 699 - protein, 736 aa, synthetic construct
  source 1..736: note = Description of Artificial Sequence: Synthetic polypeptide
MAADGYLPDWLEDNLSEGIREWWALQPGAPKPKANQQHQDNARGLVLPGYKYLGPGNGLDKGEPVNAADAAALEHDKAYDQQLKAGDNPYLKYNHADAEFQERLKEDTSFGGNLGRAVFQAKKRLLEPLGLVEEAAKTAPGKKRPVDQSPQEPDSSSGVGKSGKQPARKRLNFGQTGDSESVPDPQPLGEPPAAPTSLGSNTMASGGGAPMADNNEGADGVGNSSGNWHCDSQWLGDRVITTSTRTWALPTYNNHLYKQISSQSGASNDNHYFGYSTPWGYFDFNRFHCHFSPRDWQRLINNNWGFRPKKLSFKLFNIQVKEVTQNDGTTTIANNLTSTVQVFTDSEYQLPYVLGSAHQGCLPPFPADVFMVPQYGYLTLNNGSQAVGRSSFYCLEYFPSQMLRTGNNFQFSYTFEDVPFHSSYAHSQSLDRLMNPLIDQYLYYLNRTQGTTSGTTNQSRLLFSQAGPQSMSLQARNWLPGPCYRQQRLSKTANDNNNSNFPWTAASKYHLNGRDSLVNPGPAMASHKDDEEKFFPMHGNLIFGKEGTTASNAELDNVMITDEEEIRTTNPVATEQYGTVANNLQSSNTAPTTRTVNDQGALPGMVWQDRDVYLQGPIWAKIPHTDGHFHPSPLMGGFGLKHPPPQIMIKNTPVPANPPTTFSPAKFASFITQYSTGQVSVEIEWELQKENSKRWNPEIQYTSNYNKSVNVDFTVDTNGVYSEPRPIGTRYLTRPL

SEQ ID NO: 700 - DNA, 2211 bp, synthetic construct
  source 1..2211: mol_type = other DNA; note = Description of Artificial Sequence: Synthetic polynucleotide
atggctgccgatggttatcttccagattggctcgaggacaaccttagtgaaggaattcgcgagtggtgggctttgaaacctggagcccctcaacccaaggcaaatcaacaacatcaagacaacgctcgaggtcttgtgcttccgggttacaaataccttggacccggcaacggactcgacaagggggagccggtcaacgcagcagacgcggcggccctcgagcacgacaaggcctacgaccagcagctcaaggccggagacaacccgtacctcaagtacaaccacgccgacgccgagttccaggagcggctcaaagaagatacgtcttttgggggcaacctcgggcgagcagtcttccaggccaaaaagaggcttcttgaacctcttggtctggttgaggaagcggctaagacggctcctggaaagaagagaccggtagagccatcaccccagcgttctccagactcctctacgggcatcggcaagaaaggccaacagcccgctaaaaagagactcaattttggtcagactggcgactcagagtcagtccccgacccacaacctctcggagaacctccagcaacccccgctgctgtgggacctactacaatggcttcaggcggtggcgcaccaatggcagacaataacgagggtgccgatggagtgggtaattcctcaggaaattggcattgcgattcccaatggctgggcgacagagtcatcaccaccagcaccagaacctgggccctgcccacttacaacaaccatctctacaagcaaatctccagccaatcaggagcttcaaacgacaaccactactttggctacagcaccccttgggggtattttgactttaacagattccactgccacttttcaccacgtgactggcaaagactcatcaacaacaactggggattccgacccaagagactcaacttcaagctcttcaacatccaagtcaaggaggtcacgacgaatgatggcgtcacgaccatcgctaataaccttaccagcacggttcaagtcttctcggactcggagtaccagttgccgtacgtcctcggctctgcgcaccagggctgcctccctccgttcccggcggacgtgttcatgattccgcagtacggctacctaacgctcaacaatggcagccaagccgtgggacgttcatccttttactgcctggaatatttcccttctcagatgctgagaacgggcaacaactttaccttcagctacacttttgaggacgttcctttccacagcagctacgctcacagccagagtctggaccgtctcatgaatcctctcatcgaccagtacctgtattacttgagcagaacaaacactccaagtggaaccaccacgcagtcaaggcttcagttttctcaggccggagcgagtgacattcgggaccagtctaggaactggcttcctggaccctgttaccgccagcagcgcgtttctaaaacaaaaacagacaacaacaacagcaattttacctggactggtgcttcaaaatataaccttaatgggcgtgaatctataatcaaccctggcactgctatggcctcacacaaagacgacgaagacaagttctttcccatgagcggtgtcatgatttttggaaaagagagcgccggagcttcaaacactgcattggacaatgtcatgattacagacgaagaggaaattaaagccactaaccctgtggccaccgaaagatttgggaccgtggcagtcaatttccagagcagcagcacagaccctgcgaccggagatgtgcatgttatgggagccttacctggaatggtgtggcaagacagagacgtatacctgcagggtcctatttgggccaaaattcctcacacggatggacactttcacccgtctcctcttatgggcggctttggactcaagaacccgcctcctcagatcctcatcaaaaacacgcctgttcctgcgaatcctccggcggagttttcagctacaaagtttgcttcattcatcacccaatactccacaggacaagtgagtgtggaaattgaatgggagctgcagaaagaaaacagcaagcgctggaatcccgaagtgcagtacacatccaattatgcaaaatctgccaacgttgattttactgtggacaacaatggactttatactgagcctcgccccattggcacccgttaccttacccgtcccctgtaa

SEQ ID NO: 701 - protein, 736 aa, synthetic construct
  source 1..736: note = Description of Artificial Sequence: Synthetic polypeptide
MAADGYLPDWLEDNLSEGIREWWALKPGAPQPKANQQHQDNARGLVLPGYKYLGPGNGLDKGEPVNAADAAALEHDKAYDQQLKAGDNPYLKYNHADAEFQERLKEDTSFGGNLGRAVFQAKKRLLEPLGLVEEAAKTAPGKKRPVEPSPQRSPDSSTGIGKKGQQPAKKRLNFGQTGDSESVPDPQPLGEPPATPAAVGPTTMASGGGAPMADNNEGADGVGNSSGNWHCDSQWLGDRVITTSTRTWALPTYNNHLYKQISSQSGASNDNHYFGYSTPWGYFDFNRFHCHFSPRDWQRLINNNWGFRPKRLNFKLFNIQVKEVTTNDGVTTIANNLTSTVQVFSDSEYQLPYVLGSAHQGCLPPFPADVFMIPQYGYLTLNNGSQAVGRSSFYCLEYFPSQMLRTGNNFTFSYTFEDVPFHSSYAHSQSLDRLMNPLIDQYLYYLSRTNTPSGTTTQSRLQFSQAGASDIRDQSRNWLPGPCYRQQRVSKTKTDNNNSNFTWTGASKYNLNGRESIINPGTAMASHKDDEDKFFPMSGVMIFGKESAGASNTALDNVMITDEEEIKATNPVATERFGTVAVNFQSSSTDPATGDVHVMGALPGMVWQDRDVYLQGPIWAKIPHTDGHFHPSPLMGGFGLKNPPPQILIKNTPVPANPPAEFSATKFASFITQYSTGQVSVEIEWELQKENSKRWNPEVQYTSNYAKSANVDFTVDNNGLYTEPRPIGTRYLTRPL

SEQ ID NO: 702 - DNA, 2211 bp, synthetic construct
  source 1..2211: mol_type = other DNA; note = Description of Artificial Sequence: Synthetic polynucleotide
atggctgccgatggttatcttccagattggctcgaggacaacctctctgagggcattcgcgagtggtgggacttgaaacctggagcccctaaacccaaggcaaatcaacaacatcaggacaacgctcgaggtcttgtgcttccgggttacaaataccttggacccggcaacggactcgacaagggggagccggtcaacgcagcagacgcggcggccctcgagcacgacaaggcctacgaccagcagctcaaggccggagacaacccgtacctcaagtacaaccacgccgacgccgagttccaggagcggctcaaagaagatacgtcttttgggggcaacctcgggcgagcagtcttccaggccaaaaagaggcttcttgaacctcttggtctggttgaggaagcggctaagacggctcctggaaagaagagaccggtagagccatcaccccagcgttctccagactcctctacgggcatcggcaagaaaggccaacagcccgctaaaaagagactcaattttggtcagactggcgactcagagtcagtccccgacccacaacctctcggagaacctccagcaacccccgctgctgtgggacctactacaatggcttcaggcggtggcgcaccaatggcagacaataacgagggtgccgatggagtgggtaattcctcaggaaattggcattgcgattcccaatggctgggcgacagagtcatcaccaccagcaccagaacctgggccctgcccacttacaacaaccatctctacaagcaaatctccagccaatcaggagcttcaaacgacaaccactactttggctacagcaccccttgggggtattttgactttaacagattccactgccacttttcaccacgtgactggcaaagactcatcaacaacaactggggattccgacccaagagactcaacttcaagctcttcaacatccaagtcaaggaggtcacgacgaatgatggcgtcacgaccatcgctaataaccttaccagcacggttcaagtcttctcggactcggagtaccagttgccgtacgtcctcggctctgcgcaccagggctgcctccctccgttcccggcggacgtgttcatgattccgcagtacggctacctaacgctcaacaatggcagccaagccgtgggacgttcatccttttactgcctggaatatttcccttctcagatgctgagaacgggcaacaactttaccttcagctacacttttgaggacgttcctttccacagcagctacgctcacagccagagtctggaccgtctcatgaatcccctcatcgaccagtacctgtattacttgagcagaacaaacactccaagtggaaccaccacgcagtcaaggcttcagttttctcaggccggagcgagtgacattcgggaccagtctaggaactggcttcctggaccctgttaccggcagcagcgcgtttctaaaacaaaaacagacaacaacaacagcaactttacctggactggtgcttcaaaatataaccttaatgggcgtgaatctataatcaaccctggcactgctatggcctcacacaaagacgacgaagacaagttctttcccatgagcggtgtcatgatttttggaaaggagagcgccggagcttcaaacactgcattggacaatgtcatgatcacagacgaagaggaaatcaaagccactaaccccgtggccaccgaaagatttgggactgtggcagtcaatctccagagcagcagcacagaccctgcgaccggagatgtgcatgttatgggagccttacctggaatggtgtggcaagacagagacgtgtacctgcagggtcctatttgggccaaaattcctcacacggatggacactttcacccgtctcctctcatgggcggctttggacttaagcacccgcctcctcagatcctcatcaaaaacacgcctgttcctgcgaatcctccggcagagttttcggctacaaagtttgcttcattcatcacccagtattccacaggacaagtgagtgtggaaattgaatgggagctgcagaaagaaaacagcaagcgctggaatcccgaagtgcagtacacatccaattatgcaaaatctgccaacgttgattttactgtggacaacaatggactttatactgagcctcgccccattggcacccgttacctcacccgtcccctgtaa

SEQ ID NO: 703 - protein, 736 aa, synthetic construct
  source 1..736: note = Description of Artificial Sequence: Synthetic polypeptide
MAADGYLPDWLEDNLSEGIREWWDLKPGAPKPKANQQHQDNARGLVLPGYKYLGPGNGLDKGEPVNAADAAALEHDKAYDQQLKAGDNPYLKYNHADAEFQERLKEDTSFGGNLGRAVFQAKKRLLEPLGLVEEAAKTAPGKKRPVEPSPQRSPDSSTGIGKKGQQPAKKRLNFGQTGDSESVPDPQPLGEPPATPAAVGPTTMASGGGAPMADNNEGADGVGNSSGNWHCDSQWLGDRVITTSTRTWALPTYNNHLYKQISSQSGASNDNHYFGYSTPWGYFDFNRFHCHFSPRDWQRLINNNWGFRPKRLNFKLFNIQVKEVTTNDGVTTIANNLTSTVQVFSDSEYQLPYVLGSAHQGCLPPFPADVFMIPQYGYLTLNNGSQAVGRSSFYCLEYFPSQMLRTGNNFTFSYTFEDVPFHSSYAHSQSLDRLMNPLIDQYLYYLSRTNTPSGTTTQSRLQFSQAGASDIRDQSRNWLPGPCYRQQRVSKTKTDNNNSNFTWTGASKYNLNGRESIINPGTAMASHKDDEDKFFPMSGVMIFGKESAGASNTALDNVMITDEEEIKATNPVATERFGTVAVNLQSSSTDPATGDVHVMGALPGMVWQDRDVYLQGPIWAKIPHTDGHFHPSPLMGGFGLKHPPPQILIKNTPVPANPPAEFSATKFASFITQYSTGQVSVEIEWELQKENSKRWNPEVQYTSNYAKSANVDFTVDNNGLYTEPRPIGTRYLTRPL

SEQ ID NO: 704 - DNA, 2214 bp, synthetic construct
  source 1..2214: mol_type = other DNA; note = Description of Artificial Sequence: Synthetic polynucleotide
atggctgccgatggttatcttccagattggctcgaggacaaccttagtgaaggaattcgcgagtggtgggctttgaaacctggagcccctcaacccaaggcaaatcaacaacatcaagacaacgctcgaggtcttgtgcttccgggttacaaataccttggacccggcaacggactcgacaagggggagccggtcaacgcagcagacgcggcggccctcgagcacgacaaggcctacgaccagcagctgcaggcgggtgacaatccgtacctgcggtataaccacgccgacgccgagtttcaggagcgtctgcaagaagatacgtcttttgggggcaaccttggcagagcagtcttccaggccaaaaagaggatccttgagcctcttggtctggttgaggaagcagctaaaacggctcctggaaagaagaggcctgtagatcagtctcctcaggaaccggactcatcatctggtgttggcaaatcgggcaaacagcctgccagaaaaagactaaatttcggtcagactggcgactcagagtcagtcccagaccctcaacctctcggagaaccaccagcagcccccacaagtttgggatctaatacaatggcttcaggcggtggcgcaccaatggcagacaataacgagggtgccgatggggtgggtagttcctcgggaaattggcattgcgattcccaatgactgggggacagagtcatcaccaccagcacccgaacctgggccctgcccacctacaacaatcacctctacaagcaaatctccaacgggacatcgggaggagccaccaacgacaacacctacttcggctacagcaccccctgggggtattttgactttaacagattccactgccacttttcaccacgtgactggcagcgactcatcaacaacaactggggattccggcccaagagactcagcttcaagctcttcaacatccaggtcaaggaggtcacgcagaatgaaggcaccaagaccatcgccaataacctcaccagcaccatccaggtgtttacggactcggagtaccagctgccgtacgttctcggctctgcgcaccagggctgcctccctccgttcccggcggacgtgttcatgattccgcaatacggctacctgacgctcaacaatggcagccaagccgtgggacgttcatccttttactgcctggaatatttcccttctcagatgctgagaacgggcaacaactttaccttcagctacacctttgaggaagtgcctttccacagcagctacgcgcacagccagagcttggaccggctgatgaatcctctgattgaccagtacctgtactacttgtctcggactcaaacaacaggaggcacggcaaatacgcagactctgggcttcagccaaggtgggcctaatacaatggccaatcaggcaaagaactggctgccaggaccctgttaccgccaacaacgcgtctcaacgacaaccgggcaaaacaacaatagcaactttgcctggactgctgggaccaaataccatctgaatggaagaaattcattggctaatcctggcatcgctatggcaacacacaaagacgacgaggagcgtttttttcccagtaacgggatcctgatttttggcaaacaaaatgctgccagagacaatgcggattacagcgatgtcatgctcaccagcgaggaagaaatcaaaaccactaaccctgtggctacagaggaatacggtatcgtggcagataacttgcagcagcaaaacacggctcctcaaattggaactgtcaacagccagggggccttacccggtatggtctggcagaaccgggacgtgtacctgcagggtcccatctgggccaagattcctcacacggacggcaacttccacccgtctccgctgatgggcggctttggcctgaaacatcctccgcctcagatcctgatcaagaacacgcctgtacctgcggatcctccgaccaccttcaaccagtcaaagctgaactctttcatcacgcaatacagcaccggacaggtcagcgtggagatcgagtgggagctgcagaaggaaaacagcaagcgctggaacccggagatccagtacacttccaactattacaagtctaataatgttgaatttgctgttaatactgaaggtgtatatagtgaaccccgccccattggcaccagatacctgactcgtaatctgtaa

SEQ ID NO: 705 - protein, 736 aa, synthetic construct
  source 1..736: note = Description of Artificial Sequence: Synthetic polypeptide
MAADGYLPDWLEDNLSEGIREWWALKPGAPQPKANQQHQDNARGLVLPGYKYLGPGNGLDKGEPVNAADAAALEHDKAYDQQLQAGDNPYLRYNHADAEFQERLQEDTSFGGNLGRAVFQAKKRILEPLGLVEEAAKTAPGKKRPVDQSPQEPDSSSGVGKSGKQPARKRLNFGQTGDSESVPDPQPLGEPPAAPTSLGSNTMASGGGAPMADNNEGADGVGSSSGNWHCDSQLGDRVITTSTRTWALPTYNNHLYKQISNGTSGGATNDNTYFGYSTPWGYFDFNRFHCHFSPRDWQRLINNNWGFRPKRLSFKLFNIQVKEVTQNEGTKTIANNLTSTIQVFTDSEYQLPYVLGSAHQGCLPPFPADVFMIPQYGYLTLNNGSQAVGRSSFYCLEYFPSQMLRTGNNFTFSYTFEEVPFHSSYAHSQSLDRLMNPLIDQYLYYLSRTQTTGGTANTQTLGFSQGGPNTMANQAKNWLPGPCYRQQRVSTTTGQNNNSNFAWTAGTKYHLNGRNSLANPGIAMATHKDDEERFFPSNGILIFGKQNAARDNADYSDVMLTSEEEIKTTNPVATEEYGIVADNLQQQNTAPQIGTVNSQGALPGMVWQNRDVYLQGPIWAKIPHTDGNFHPSPLMGGFGLKHPPPQILIKNTPVPADPPTTFNQSKLNSFITQYSTGQVSVEIEWELQKENSKRWNPEIQYTSNYYKSNNVEFAVNTEGVYSEPRPIGTRYLTRNL

SEQ ID NO: 706 - DNA, 2214 bp, synthetic construct
  source 1..2214: mol_type = other DNA; note = Description of Artificial Sequence: Synthetic polynucleotide
atggctgccgatggttatcttccagattggctcgaggacaaccttagtgaaggaattcgcgagtggtgggctttgaaacctggagcccctcaacccaaggcaaatcaacaacatcaagacaacgctcgaggtcttgtgcttccgggttacaaataccttggacccggcaacggactcgacaagggggagccggtcaacgcagcagacgcggcggccctcgagcacgacaaggcctacgaccagcagctgcaggcgggtgacaatccgtacctgcggtataaccacgccgacgccgagtttcaggagcgtctgcaagaagatacgtcttttgggggcaaccttggcagagcagtcttccaggccaaaaagaggatccttgagcctcttggtctggttgaggaagcagctaaaacggctcctggaaagaagaggcctgtagatcagtctcctcaggaaccggactcatcatctggtgttggcaaatcgggcaaacagcctgccagaaaaagactaaatttcggtcagactggcgactcagagtcagtcccagaccctcaacctctcggagaaccaccagcagcccccacaagtttgggatctaatacaatggcttcaggcggtggcgcaccaatggcagacaataacgagggtgccgatggggtgggtagttcctcgggaaattggcattgcgattcccaatggctgggggacagagtcatcaccaccagcacccgaacctgggccctgcccacctacaacaatcacctctacaagcaaatctccaacgggacatcgggaggagccaccaacgacaacacctacttcggctacagcaccccctgggggtattttgactttaacagattccactgccacttttcaccacgtgactggcagcgactcatcaacaacaactggggattccggcccaagagactcagcttcaagctcttcaacatccaggtcaaggaggtcacgcagaatgaaggcaccaagaccatcgccaataacctcaccagcaccatccaggtgtttacggactcggagtaccagctgccgtacgttctcggctctgcgcaccagggctgcctccctccgttcccggcggacgtgttcatgattccgcaatacggctacctgacgctcaacaatggcagccaagccgtgggacgttcatccttttactgcctggaatatttcccttctcagatgctgagaacgggcaacaactttaccttcagctacacctttgaggaagtgccttttcacagcagctacgcgcacagccagagcttggaccggctgatgaatcctctgattgaccagtacctgtactacttgtctcggactcaaacaacaggaggcacggcaaatacgcagactctgggcttcagccaaggtgggcctaatacaatggccaatcaggcaaagaactggctgccaggaccctgttaccgccaacaacgcgtctcaacgacaaccgggcaaaacaacaatagcaactttgcctggactgctgggaccaaataccatctgaatggaagaaattcattggctaatcctggcatcgctatggcaacacacaaagacgacgaggagcgtttttttcccagtaacgggatcctgatttttggcaaacaaaatgctgccagagacaatgcggattacagcgatgtcatgctcaccagcgaggaagaaatcaaaaccactaaccctgtggctacagaggaatacggtatcgtggcagataacttgcagcagcaaaacacggctcctcaaattggaactgtcaacagccagggggccttacccggtatggtctggcagaaccgggacgtgtacctgcagggtcccatctgggccaagattcctcacacggacggcaacttccacccgtctccgctgatgggcggctttggcctgaaacatcctccgcctcagatcctgatcaagaacacgcctgtacctgcggatcctccgaccaccttcaaccagtcaaagctgaactctttcatcacgcaatacagcaccggacaggtcagcgtggagatcgagtgggagctgcagaaggaaaacagcaagcgctggaacccggagatccagtacacttccaactattacaagtctaataatgttgaatttgctgttaatactgaaggtgtatatagtgaaccccgccccattggcaccagatacctgactcgtaatctgtaa

SEQ ID NO: 707 - protein, 737 aa, synthetic construct; identical to SEQ ID NO: 695
  source 1..737: note = Description of Artificial Sequence: Synthetic polypeptide

SEQ ID NO: 708 - DNA, 2211 bp, synthetic construct
  source 1..2211: mol_type = other DNA; note = Description of Artificial Sequence: Synthetic polynucleotide
atggctgccgatggttatcttccagattggctcgaggacaacctctctgagggcattcgcgagtggtgggacttgaaacctggagcccctaaacccaaggcaaatcaacaacatcaggacaacgctcgaggtcttgtgcttccgggttacaaataccttggacccggcaacggactcgacaagggggagccggtcaacgcagcagacgcggcggccctcgagcacgacaaggcctacgaccagcagctcaaggccggagacaacccgtacctcaagtacaaccacgccgacgccgagttccaggagcggctcaaagaagatacgtcttttgggggcaacctcgggcgagcagtcttccaggccaaaaagaggcttcttgaacctcttggtctggttgaggaagcggctaagacggctcctggaaagaagagaccggtagagccatcaccccagcgttctccagactcctctacgggcatcggcaagaaaggccaacagcccgctaaaaagagactcaattttggtcagactggcgactcagagtcagtccccgacccacaacctctcggagaacctccagcaacccccgctgctgtgggacctactacaatggcttcaggcggtggcgcaccaatggcagacaataacgagggtgccgatggagtgggtaattcctcaggaaattggcattgcgattcccaatggctgggcgacagagtcatcaccaccagcaccagaacctgggccctgcccacttacaacaaccatctctacaagcaaatctccagccaatcaggagcttcaaacgacaaccactactttggctacagcaccccttgggggtattttgactttaacagattccactgccacttttcaccacgtgactggcaaagactcatcaacaacaactggggattccgacccaagagactcaacttcaagctcttcaacatccaagtcaaggaggtcacgacgaatgatggcgtcacgaccatcgctaataaccttaccagcacggttcaagtcttctcggactcggagtaccagttgccgtacgtcctcggctctgcgcaccagggctgcctccctccgttcccggcggacgtgttcatgattccgcagtacggctacctaacgctcaacaatggcagccaagccgtgggacgttcatccttttactgcctggaatatttcccttctcagatgctgagaacgggcaacaactttaccttcagctacacttttgaggacgttcctttccacagcagctacgctcacagccagagtctggaccgtctcatgaatcctctcatcgaccagtacctgtattacttgagcagaacaaacactccaagtggaaccaccacgcagtcaaggcttcagttttctcaggccggagcgagtgacattcgggaccagtctaggaactggcttcctggaccctgttaccgccagcagcgcgtttctaaaacaaaaacagacaacaacaacagcaattttacctggactggtgcttcaaaatataaccttaatgggcgtgaatctataatcaaccctggcactgctatggcctcacacaaagacgacgaagacaagttctttcccatgagcggtgtcatgatttttggaaaagagagcgccggagcttcaaacactgcattggacaatgtcatgattacagacgaagaggaaattaaagccactaaccctgtggccaccgaaagatttgggaccgtggcagtcaatttccagagcagcagcacagaccctgcgaccggagatgtgcatgctatgggagcattacctggcatggtgtggcaagatagagacgtgtacctgcagggtcccatttgggccaaaattcctcacacagatggacactttcacccgtctcctcttatgggcggctttggactcaagaacccgcctcctcagatcctcatcaaaaacacgcctgttcctgcgaatcctccggcggagttttcagctacaaagtttgcttcattcatcacccaatactccacaggacaagtgagtgtggaaattgaatgggagctgcagaaagaaaacagcaagcgctggaatcccgaagtgcagtacacatccaattatgcaaaatctgccaacgttgattttactgtggacaacaatggactttatactgagcctcgccccattggcacccgttaccttacccgtcccctgtaa

SEQ ID NO: 709 - protein, 736 aa, synthetic construct
  source 1..736: note = Description of Artificial Sequence: Synthetic polypeptide
MAADGYLPDWLEDNLSEGIREWWDLKPGAPKPKANQQHQDNARGLVLPGYKYLGPGNGLDKGEPVNAADAAALEHDKAYDQQLKAGDNPYLKYNHADAEFQERLKEDTSFGGNLGRAVFQAKKRLLEPLGLVEEAAKTAPGKKRPVEPSPQRSPDSSTGIGKKGQQPAKKRLNFGQTGDSESVPDPQPLGEPPATPAAVGPTTMASGGGAPMADNNEGADGVGNSSGNWHCDSQWLGDRVITTSTRTWALPTYNNHLYKQISSQSGASNDNHYFGYSTPWGYFDFNRFHCHFSPRDWQRLINNNWGFRPKRLNFKLFNIQVKEVTTNDGVTTIANNLTSTVQVFSDSEYQLPYVLGSAHQGCLPPFPADVFMIPQYGYLTLNNGSQAVGRSSFYCLEYFPSQMLRTGNNFTFSYTFEDVPFHSSYAHSQSLDRLMNPLIDQYLYYLSRTNTPSGTTTQSRLQFSQAGASDIRDQSRNWLPGPCYRQQRVSKTKTDNNNSNFTWTGASKYNLNGRESIINPGTAMASHKDDEDKFFPMSGVMIFGKESAGASNTALDNVMITDEEEIKATNPVATERFGTVAVNFQSSSTDPATGDVHAMGALPGMVWQDRDVYLQGPIWAKIPHTDGHFHPSPLMGGFGLKNPPPQILIKNTPVPANPPAEFSATKFASFITQYSTGQVSVEIEWELQKENSKRWNPEVQYTSNYAKSANVDFTVDNNGLYTEPRPIGTRYLTRPL

SEQ ID NO: 710 - DNA, 2211 bp, synthetic construct
  source 1..2211: mol_type = other DNA; note = Description of Artificial Sequence: Synthetic polynucleotide
atggctgccgatggttatcttccagattggctcgaggacaaccttagtgaaggaattcgcgagtggtgggcgctgaaacctggagccccgaagcccaaagccaaccagcaaaagcaggacgacggccggggtctggtgcttccgggttacaaatacctcggacccggtaacggactcgacaaaggagagccggtcaacgaggcggacgcggcagccctcgagcacgacaaggcctacgaccagcagctcaaagcgggtgacaatccgtacctgcggtataaccacgccgacgccgagtttcaggagcgtctgcaagaagatacgtcttttgggggcaacctcgggcgagcagtcttccaggccaagaagcgggttctcgaacctctcggtctggttgaggaaggcgctaagacggctcccggaaagaaacgtccggtagagcagtcgccacaagagccagactcctctacgggcatcggcaagaaaggccaacagcccgccagaaaaagactcaatttcggtcagactggcgactcagagtcagttccagaccctcaacctctcggagaacctccagcagcgccctctggtgtgggacctactacaatggcttcaggcggtggcgcaccaatggcagacaataacgaaggcgccgacggagtgggtaatgcctcaggaaattggcattgcgattccacatggctgggcgacagagtcatcaccaccagcacccgaacatgggccttgcccacctataacaaccacctctacaagcaaatctccagtgcttcaacgggggccagcaacgacaacacctacttcggctacagcaccccctgggggtattttgatttcaacagattccactgccatttctcaccacgtgactggcagcgactcatcaacaacaattggggattccggcccaagagactcaacttcaaactcttcaacatccaagtcaaggaggtcacgacgaatgatggcgtcacgaccatcgctaataaccttaccagcacggttcaagtcttctcggactcggagtaccagttgccgtacgtcctcggctctgcgcaccagggctgcctccctccgttcccggcggacgtgttcatgattccgcagtacggctacctaacgctcaacaatggcagccaggcagtgggacggtcatccttttactgcctggaatatttcccatcgcagatgctgagaacgggcaataactttaccttcagctacaccttcgaggacgtgcctttccacagcagctacgcgcacagccagagcctggaccggctgatgaatcctctcatcgaccagtacctgtattacctgaacagaactcagaatcagtccggaagtgcccaaaacaaggacttgctgtttagccgggggtctccagctggcatgtctgttcagcccaaaaactggctacctggaccctgttatcggcagcagcgcgtttctaaaacaaaaacagacaacaacaacagcaattttacctggactggtgcttcaaaatataacctcaatgggcgtgaatccatcatcaaccctggcactgctatggcctcacacaaagacgacgaagacaagttctttcccatgagcggtgtcatgatttttggaaaagagagcgccggagcttcaaacactgcattggacaatgtcatgattacagacgaagaggaaattaaagccactaaccctgtggccaccgaaagatttgggaccgtggcagtcaatttccagagcagcagcacagaccctgcgaccggagatgtgcatgttatgggagccttacctggaatggtgtggcaagacagagacgtatacctgcagggtcctatttgggccaaaattcctcacacagatggacactttcacccgtctcctcttatgggcggctttggactcaagaacccgcctcctcagatcctcatcaaaaacacgcctgttcctgcgaatcctccggcagagttttcggctacaaagtttgcttcattcatcacccagtattccacaggacaagtgagcgtggagattgaatgggagctgcagaaagaaaacagcaaacgctggaatcccgaagtgcagtatacatctaactatgcaaaatctgccaacgttgatttcactgtggacaacaatggactttatactgagcctcgccccattggcacccgttacctcacccgtcccctgtaa

SEQ ID NO: 711 - protein, 736 aa, synthetic construct
  source 1..736: note = Description of Artificial Sequence: Synthetic polypeptide
MAADGYLPDWLEDNLSEGIREWWALKPGAPKPKANQQKQDDGRGLVLPGYKYLGPGNGLDKGEPVNEADAAALEHDKAYDQQLKAGDNPYLRYNHADAEFQERLQEDTSFGGNLGRAVFQAKKRVLEPLGLVEEGAKTAPGKKRPVEQSPQEPDSSTGIGKKGQQPARKRLNFGQTGDSESVPDPQPLGEPPAAPSGVGPTTMASGGGAPMADNNEGADGVGNASGNWHCDSTWLGDRVITTSTRTWALPTYNNHLYKQISSASTGASNDNTYFGYSTPWGYFDFNRFHCHFSPRDWQRLINNNWGFRPKRLNFKLFNIQVKEVTTNDGVTTIANNLTSTVQVFSDSEYQLPYVLGSAHQGCLPPFPADVFMIPQYGYLTLNNGSQAVGRSSFYCLEYFPSQMLRTGNNFTFSYTFEDVPFHSSYAHSQSLDRLMNPLIDQYLYYLNRTQNQSGSAQNKDLLFSRGSPAGMSVQPKNWLPGPCYRQQRVSKTKTDNNNSNFTWTGASKYNLNGRESIINPGTAMASHKDDEDKFFPMSGVMIFGKESAGASNTALDNVMITDEEEIKATNPVATERFGTVAVNFQSSSTDPATGDVHVMGALPGMVWQDRDVYLQGPIWAKIPHTDGHFHPSPLMGGFGLKNPPPQILIKNTPVPANPPAEFSATKFASFITQYSTGQVSVEIEWELQKENSKRWNPEVQYTSNYAKSANVDFTVDNNGLYTEPRPIGTRYLTRPL

SEQ ID NO: 712 - DNA, 2205 bp, synthetic construct
  source 1..2205: mol_type = other DNA; note = Description of Artificial Sequence: Synthetic polynucleotide
atggctgctgacggttatcttccagattggctcgaggacaacctttctgaaggcattcgtgagtggtgggctctgaaacctggagtccctcaacccaaagcgaaccaacaacaccaggacaaccgtcggggtcttgtgcttccgggttacaaatacctcggacccggtaacggactcgacaaaggagagccggtcaacgaggcggacgcggcagccctcgaacacgacaaggcctacgaccagcagctcaaggccggagacaacccgtacctcaagtacaaccacgccgacgccgagttccaggagcggctcaaagaagatacgtcttttgggggcaacctcgggcgagcagtcttccaggccaaaaagaggcttcttgaacctcttggtctggttgaggaagcggctaagacggctcctggaaagaagaggcctgtagagcagtctcctcaggaaccggactcctccgcgggtattggcaaatcgggtgcacagcccgctaaaaagagactcaatttcggtcagactggcgacacagagtcagtcccagaccctcaaccaatcggagaacctcccgcagccccctcaggtgtgggatctcttacaatggcttcaggtggtggcgcaccagtggcagacaataacgaaggtgccgatggagtgggtagttcctcgggaaattggcattgcgattcccaatggctgggggacagagtcatcaccaccagcacccgaacctgggccctgcccacctacaacaaccacctctacaaacaaatttccagccaatcaggagcctcgaacgacaatcactactttggctacagcaccccttgggggtattttgacttcaacagattccactgccacttttcaccacgtgactggcagcgactcatcaacaacaactggggattccggcccaagagactcagcttcaagctcttcaacatccaggtcaaagaggttacggacaacaatggagtcaagaccatcgccaataaccttaccagcacggtccaggtcttcacggactcagactatcagctcccgtacgtgctcgggtcggctcacgagggctgcctcccgccgttcccagcggacgttttcatgattcctcagtacgggtatctgacgcttaatgatggaagccaggccgtgggtcgttcgtccttttactgcctggaatatttcccgtcgcaaatgctaagaacgggtaacaacttccagttcagctacgagtttgagaacgtacctttccatagcagctacgctcacagccaaagcctggaccgactaatgaatccactcatcgaccaatacttgtactatctctcaaagactattaacggttctggacagaatcaacaaacgctaaaattcagtgtggccggacccagcaacatggctgtccagggaagaaactacatacctggacccagctaccgacaacaacgtgtctcaaccactgtgactcaaaacaacaacagcgaatttgcttggcctggagcttcttcttgggctctcaatggacgtaatagcttgatgaatcctggacctgctatggccagccacaaagaaggagaggaccgtttctttcctttgtctggatctttaatttttggcaaacaaggaactggaagagacaacgtggatgcggacaaagtcatgataaccaacgaagaagaaattaaaactactaacccggtagcaacggagtcctatggacaagtggccacaaaccaccagagtgcccaagcacaggcgcagaccggctgggttcaaaaccaaggaatacttccgggtatggtttggcaggacagagatgtgtacctgcaaggacccatctgggccaagattcctcacacggacggcaacttccacccgtctccgctgatgggcggctttggcctgaaacatcctccgcctcagatcctgatcaagaacacgcctgtacctgcggatcctccgaccaccttcaaccagtcaaagctgaactctttcatcacgcaatacagcaccggacaggtcagcgtggaaattgaatgggagctgcagaaggaaaacagcaagcgctggaatcccgaagtgcagtatacatctaactatgcaaaatctgccaacgttgatttcactgtggacaacaatggactttatactgagcctcgccccattggcacccgttacctcacccgtcccctgtaa

SEQ ID NO: 713 - protein, 734 aa, synthetic construct
  source 1..734: note = Description of Artificial Sequence: Synthetic polypeptide
MAADGYLPDWLEDNLSEGIREWWALKPGVPQPKANQQHQDNRRGLVLPGYKYLGPGNGLDKGEPVNEADAAALEHDKAYDQQLKAGDNPYLKYNHADAEFQERLKEDTSFGGNLGRAVFQAKKRLLEPLGLVEEAAKTAPGKKRPVEQSPQEPDSSAGIGKSGAQPAKKRLNFGQTGDTESVPDPQPIGEPPAAPSGVGSLTMASGGGAPVADNNEGADGVGSSSGNWHCDSQWLGDRVITTSTRTWALPTYNNHLYKQISSQSGASNDNHYFGYSTPWGYFDFNRFHCHFSPRDWQRLINNNWGFRPKRLSFKLFNIQVKEVTDNNGVKTIANNLTSTVQVFTDSDYQLPYVLGSAHEGCLPPFPADVFMIPQYGYLTLNDGSQAVGRSSFYCLEYFPSQMLRTGNNFQFSYEFENVPFHSSYAHSQSLDRLMNPLIDQYLYYLSKTINGSGQNQQTLKFSVAGPSNMAVQGRNYIPGPSYRQQRVSTTVTQNNNSEFAWPGASSWALNGRNSLMNPGPAMASHKEGEDRFFPLSGSLIFGKQGTGRDNVDADKVMITNEEEIKTTNPVATESYGQVATNHQSAQAQAQTGWVQNQGILPGMVWQDRDVYLQGPIWAKIPHTDGNFHPSPLMGGFGLKHPPPQILIKNTPVPADPPTTFNQSKLNSFITQYSTGQVSVEIEWELQKENSKRWNPEVQYTSNYAKSANVDFTVDNNGLYTEPRPIGTRYLTRPL

SEQ ID NO: 714 - DNA, 2211 bp, synthetic construct
  source 1..2211: mol_type = other DNA; note = Description of Artificial Sequence: Synthetic polynucleotide
atggctgccgatggttatcttccagattggctcgaggacaacctctctgagggcattcgcgagtggtgggcgctgaaacctggagccccgaagcccaaagccaaccagcaaaagcaggacgacggccggggtctggtgcttcctggctacaagtacctcggacccttcaacggactcgacaagggggagcccgtcaacgcggcggacgcagcggccctcgagcacgacaaggcctacgaccagcagctgcaggcgggtgacaatccgtacctgcggtataaccacgccgacgccgagtttcaggagcgtctgcaagaagatacgtcttttgggggcaacctcgggcgagcagtcttccaggccaagaagtgggttctcgaacctctcggtctggttgaggaaggcgctaagacggctcctggaaagaaacgtccggtagagcagtcgccacaagagccagactcctcctcgggcatcggcaagacaggccagcagcccgctaaaaagagactcaattttggtcagactggcgactcagagtcagtccccgacccacaacctctcggagaacctccagcaacccccgctgctgtgggacctactacaatggcttcaggcggtggcgcaccaatggcagacaataacgaaggcgccgacggagtgggtaatgcctcaggaaattggcattgcgattccacatggctgggcgacagagtcatcaccaccagcacccgcacctgggccttgcccacctacaataaccacctctacaagcaaatctccagtgcttcaacgggggccagcaacgacaaccactacttcggctacagcaccccctgggggtattttgatttcaacagattccactgccatttctcaccacgtgactggcagcgactcatcaacaacaattggggattccggcccaagagactcaacttcaagctcttcaacatccaagtcaaggaggtcacgacgaatgatggcgtcacaaccatcgctaataaccttaccagcacggttcaagtcttctcggactcggagtaccagcttccgtacgtcctcggctctgcgcaccagggctgcctccctccgttcccggcggacgtgttcatgattccgcaatacggctacctgacgctcaacaatggcagccaagccgtgggacgttcatccttttactgcctggaatatttcccttctcagatgctgagaacgggcaacaactttaccttcagctacacctttgaggaagtgcctttccacagcagctacgcgcacagccagagcctggaccggctgatgaatcctctcatcgaccaatacctgtattacctgaacagaactcaaaatcagtccggaagtgcccaaaacaaggacttgctgtttagccgtgggtctccagctggcatgtctgttcagcccaaaaactggctacctggaccctgttatcggcagcagcgcgtttctaaaacaaaaacagacaacaacaacagcaattttacctggactggtgcttcaaaatataacctcaatgggcgtgaatccatcatcaaccctggcactgctatggcctcacacaaagacgacgaagacaagttctttcccatgagcggtgtcatgatttttggaaaggagagcgccggagcttcaaacactgcattggacaatgtcatgatcaccgacgaagaggaaatcaaagccactaaccccgtggccaccgaaagatttgggactgtggcagtcaatctccagagcagcagcacagaccctgcgaccggagatgtgcatgttatgggagccttacctggcatggtgtggcaagatagagacgtgtacctgcagggtcccatttgggccaaaattcctcacacagatggacactttcacccgtctcctcttatgggcggctttggactcaagaacccgcctcctcagatcctcatcaaaaacacgcctgttcctgcgaatcctccggcggagttttcagctacaaagtttgcttcattcatcacccaatactccacaggacaagtgagtgtggaaattgaatgggagctgcagaaagaaaacagcaagcgctggaatcccgaagtgcagtacacatccaattatgcaaaatctgccaacgttgattttactgtggacaacaatggactttatactgagcctcgccccattggcacccgttacctcacccgtcccctgtaa

SEQ ID NO: 715 - protein, 736 aa, synthetic construct
  source 1..736: note = Description of Artificial Sequence: Synthetic polypeptide
MAADGYLPDWLEDNLSEGIREWWALKPGAPKPKANQQKQDDGRGLVLPGYKYLGPFNGLDKGEPVNAADAAALEHDKAYDQQLQAGDNPYLRYNHADAEFQERLQEDTSFGGNLGRAVFQAKKWVLEPLGLVEEGAKTAPGKKRPVEQSPQEPDSSSGIGKTGQQPAKKRLNFGQTGDSESVPDPQPLGEPPATPAAVGPTTMASGGGAPMADNNEGADGVGNASGNWHCDSTWLGDRVITTSTRTWALPTYNNHLYKQISSASTGASNDNHYFGYSTPWGYFDFNRFHCHFSPRDWQRLINNNWGFRPKRLNFKLFNIQVKEVTTNDGVTTIANNLTSTVQVFSDSEYQLPYVLGSAHQGCLPPFPADVFMIPQYGYLTLNNGSQAVGRSSFYCLEYFPSQMLRTGNNFTFSYTFEEVPFHSSYAHSQSLDRLMNPLIDQYLYYLNRTQNQSGSAQNKDLLFSRGSPAGMSVQPKNWLPGPCYRQQRVSKTKTDNNNSNFTWTGASKYNLNGRESIINPGTAMASHKDDEDKFFPMSGVMIFGKESAGASNTALDNVMITDEEEIKATNPVATERFGTVAVNLQSSSTDPATGDVHVMGALPGMVWQDRDVYLQGPIWAKIPHTDGHFHPSPLMGGFGLKNPPPQILIKNTPVPANPPAEFSATKFASFITQYSTGQVSVEIEWELQKENSKRWNPEVQYTSNYAKSANVDFTVDNNGLYTEPRPIGTRYLTRPL

SEQ ID NO: 716 - DNA, 2214 bp, synthetic construct
  source 1..2214: mol_type = other DNA; note = Description of Artificial Sequence: Synthetic polynucleotide
atggctgccgatggttatcttccagattggctcgaggacaaccttagtgaaggaattcgcgagtggtgggctttgaaacctggagcccctcaacccaaggcaaatcaacaacatcaagacaacgctcgaggtcttgtgcttccgggttacaaataccttggacccggcaacggactcgacaagggggagccggtcaacgcagcagacgcggcggccctcgagcacgacaaggcctacgaccagcagctgcaggcgggtgacaatccgtacctgcggtataaccacgccgacgccgagtttcaggagcgtctgcaagaagatacgtcttttgggggcaaccttggcagagcagtcttccaggccaaaaagaggatccttgagcctcttggtctggttgaggaagcagctaaaacggctcctggaaagaagaggcctgtagatcagtctcctcaggaaccggactcatcatctggtgttggcaaatcgggcaaacagcctgccagaaaaagactaaatttcggtcagactggcgactcagagtcagtcccagaccctcaacctctcggagaaccaccagcagcccccacaagtttgggatctaatacaatggcttcaggcggtggcgcaccaatggcagacaataacgagggtgccgatggggtgggtagttcctcgggaaattggcattgcgattcccaatggctgggggacagagtcatcaccaccagcacccgaacctgggccctgcccacctacaacaatcacctctacaagcaaatctccaacgggacatcgggaggagccaccaacgacaacacctacttcggctacagcaccccctgggggtattttgactttaacagattccactgccacttttcaccacgtgactggcagcgactcatcaacaacaactggggattccggcccaagagactcagcttcaagctcttcaacatccaggtcaaggaggtcacgcagaatgaaggcaccaagaccatcgccaataacctcaccagcaccatccaggtgtttacggactcggagtaccagctgccgtacgttctcggctcggcgcaccagggctgcctccctccgttcccggcggacgtcttcatggtgccacagtatggatacctgacgctcaacaatggcagccaagccgtgggacgttcatccttttactgcctggaatatttcccttctcagatgctgagaacgggcaacaactttaccttcagctacacctttgaggaagtgcctttccacagcagctacgcgcacagccagagcttggaccggctgatgaatcctctgattgaccagtacctgtactacttgtctcggactcaaacaacaggaggcacggcaaatacgcagactctgggcttcagccaaggtgggcctaatacaatggccaatcaggcaaagaactggctgccaggaccctgttaccgccaacaacgcgtctcaacgacaaccgggcaaaacaacaatagcaactttgcctggactgctgggaccaaataccatctgaatggaagaaattcattggctaatcctggcatcgctatggcaacacacaaagacgacgaggagcgtttttttcccagtaacgggatcctgatttttggcaaacaaaatgctgccagagacaatgcggattacagcgatgtcatgctcaccagcgaggaagaaatcaaaaccactaaccctgtggctacagaggaatacggtatcgtggcagataacttgcagcagcaaaacacggctcctcaaattggaactgtcaacagccagggggacttacccggtatggtctggcagaaccgggacgtgtacctgcagggtcccatctgggccaagattcctcacacggacggcaacttccacccgtctccgctgatgggcggctttggcctgaaacatcctccgcctcagatcctgatcaagaacacgcctgtacctgcggatcctccgaccaccttcaaccagtcaaagctgaactctttcatcacgcaatacagcaccggacaggtcagcgtggagatcgagtgggagctgcagaaggaaaacagcaagcgctggaacccggagatccagtacacttccaactattacaagtctaataatgttgaatttgctgttaatactgaaggtgtatatagtgaaccccgccccattggcaccagatacctgactcgtaatctgtaa

SEQ ID NO: 717 - protein, 737 aa, synthetic construct
  source 1..737: note = Description of Artificial Sequence: Synthetic polypeptide
MAADGYLPDWLEDNLSEGIREWWALKPGAPQPKANQQHQDNARGLVLPGYKYLGPGNGLDKGEPVNAADAAALEHDKAYDQQLQAGDNPYLRYNHADAEFQERLQEDTSFGGNLGRAVFQAKKRILEPLGLVEEAAKTAPGKKRPVDQSPQEPDSSSGVGKSGKQPARKRLNFGQTGDSESVPDPQPLGEPPAAPTSLGSNTMASGGGAPMADNNEGADGVGSSSGNWHCDSQWLGDRVITTSTRTWALPTYNNHLYKQISNGTSGGATNDNTYFGYSTPWGYFDFNRFHCHFSPRDWQRLINNNWGFRPKRLSFKLFNIQVKEVTQNEGTKTIANNLTSTIQVFTDSEYQLPYVLGSAHQGCLPPFPADVFMVPQYGYLTLNNGSQAVGRSSFYCLEYFPSQMLRTGNNFTFSYTFEEVPFHSSYAHSQSLDRLMNPLIDQYLYYLSRTQTTGGTANTQTLGFSQGGPNTMANQAKNWLPGPCYRQQRVSTTTGQNNNSNFAWTAGTKYHLNGRNSLANPGIAMATHKDDEERFFPSNGILIFGKQNAARDNADYSDVMLTSEEEIKTTNPVATEEYGIVADNLQQQNTAPQIGTVNSQGDLPGMVWQNRDVYLQGPIWAKIPHTDGNFHPSPLMGGFGLKHPPPQILIKNTPVPADPPTTFNQSKLNSFITQYSTGQVSVEIEWELQKENSKRWNPEIQYTSNYYKSNNVEFAVNTEGVYSEPRPIGTRYLTRNL

SEQ ID NO: 718 - DNA, 2205 bp, synthetic construct
  source 1..2205: mol_type = other DNA; note = Description of Artificial Sequence: Synthetic polynucleotide
atggctgctgacggttatcttccagattggctcgaggacaacctttctgaaggcattcgtgagtggtgggctctgaaacctggagtccctcaacccaaagcgaaccaacaacaccaggacaactgtcggggtcttgtgcttccgggttacaaatacctcggacccggtaacggactcgacaaaggagagccggtcaacgaggcggacgcggcagccctcgaacacgacaaggcctacgaccagcagctcaaggccggagacaacccgtacctcaagtacaaccacgccgacgccgagttccaggagcggctcaaagaagatacgtcttttgggggcaacctcgggcgagcagtcttccagaccaaaaagaggcttcttgaacctcttggtctggttgaggaagcggctaagacggctcctggaaagaagaggcctgtagagcagtctcctcaggaaccggactcctccgcgggtattggcaaatcgggtgcacagcccgctaaaaagagactcaatttcggtcagactggcgacacagagtcagtcccagaccctcaaccaatcggagaacctcccgcagccccctcaggtgtgggatctcttacaatggcttcaggtggtggcgcaccagtggcagacaataacgaaggtgccgatggagtgggtagttcctcgggaaattggcattgcgattcccaatggctgggggacagagtcatcaccaccagcacccgaacctgggccctgcccacctacaacaaccacctctacaaacaaatttccagccaatcaggagcctcgaacgacaatcactactttggctacagcaccccttgggggtattttgacttcaacagattccactgccacttttcaccacgtgactggcagcgactcatcaacaacaactggggattccggcccaagagactcagcttcaagctcttcaacatccaggtcaaagaggttacggacaacaatggagtcaagaccatcgccaataaccttaccagcacggtccaggtcttcacggactcagactatcagctcccgtacgtgctcgggtcggctcacgagggctgcctcccgccgttcccagcggacgttttcatgattcctcagtacgggtatctgacgcttaatgatggaagccaggccgtgggtcgttcgtccttttactgcctggaatatttcccgtcgcaaatgctaagaacgggtaacaacttccagttcagctacgagtttgagaacgtacctttccatagcagctacgctcacagccaaagcctggaccgactaatgaatccactcatcgaccaatacttgtactatctctcaaagactattaacggttctggacagaatcaacaaacgctaaaattcagtgtggccggacccagcaacatggctgtccagggaagaaactacatacctggacccagctaccgacaacaacgtgtctcaaccactgtgactcaaaacaacaacagcgaatttgcttggcctggagcttcttcttgggctctcaatggacgtaatagcttgatgaatcctggacctgctatggccagccacaaagaaggagaggaccgtttctttcctttgtctggatctttaatttttggcaaacaaggaactggaagagacaacgtggatgcggacaaagtcatgataaccaacgaagaagaaattaaaactactaacccggtagcaacggagtcctatggacaagtggccacaaaccaccagagtgcccaagcacaggcgcagaccggctgggttcaaaaccaaggaatacttccgggtatggtttggcaggacagagatgtgtacctgcaaggacccatctgggccaagattcctcacacggacggcaacttccacccgtctccgctgatgggcggctttggcctgaaacatcctccgcctcagatcctgatcaagaacacgcctgttcctgcgaatcctccggcggagttttcagctacaaagtttgcttcattcatcacccagtactccacaggacaagtgagtgtggaaattgaatgggagctgcagaaagaaaacagcaagcgctggaatcccgaagtgcagtacacatccaattatgcaaaatctgccaacgttgattttactgtggacaacaatggactttatactgagcctcgccccattggcacccgttaccttaccaaacctctgtaa

SEQ ID NO: 719 - protein, 734 aa, synthetic construct
  source 1..734: note = Description of Artificial Sequence: Synthetic polypeptide
MAADGYLPDWLEDNLSEGIREWWALKPGVPQPKANQQHQDNCRGLVLPGYKYLGPGNGLDKGEPVNEADAAALEHDKAYDQQLKAGDNPYLKYNHADAEFQERLKEDTSFGGNLGRAVFQTKKRLLEPLGLVEEAAKTAPGKKRPVEQSPQEPDSSAGIGKSGAQPAKKRLNFGQTGDTESVPDPQPIGEPPAAPSGVGSLTMASGGGAPVADNNEGADGVGSSSGNWHCDSQWLGDRVITTSTRTWALPTYNNHLYKQISSQSGASNDNHYFGYSTPWGYFDFNRFHCHFSPRDWQRLINNNWGFRPKRLSFKLFNIQVKEVTDNNGVKTIANNLTSTVQVFTDSDYQLPYVLGSAHEGCLPPFPADVFMIPQYGYLTLNDGSQAVGRSSFYCLEYFPSQMLRTGNNFQFSYEFENVPFHSSYAHSQSLDRLMNPLIDQYLYYLSKTINGSGQNQQTLKFSVAGPSNMAVQGRNYIPGPSYRQQRVSTTVTQNNNSEFAWPGASSWALNGRNSLMNPGPAMASHKEGEDRFFPLSGSLIFGKQGTGRDNVDADKVMITNEEEIKTTNPVATESYGQVATNHQSAQAQAQTGWVQNQGILPGMVWQDRDVYLQGPIWAKIPHTDGNFHPSPLMGGFGLKHPPPQILIKNTPVPANPPAEFSATKFASFITQYSTGQVSVEIEWELQKENSKRWNPEVQYTSNYAKSANVDFTVDNNGLYTEPRPIGTRYLTKPL

SEQ ID NO: 720 - DNA, 2211 bp, synthetic construct
  source 1..2211: mol_type = other DNA; note = Description of Artificial Sequence: Synthetic polynucleotide
atggctgccgatggttatcttccagattggctcgaggacaacctctctgagggcattcgcgagtggtgggacttgaaacctggagcccctaaacccaaggcaaatcaacaacatcaggacaacgctcgaggtcttgtgcttccgggttacaaataccttggacccggcaacggactcgacaagggggagccggtcaacgcagcagacgcggcggccctcgagcacgacaaggcctacgaccagcagctcaaggccggagacaacccgtacctcaagtacaaccacgccgacgccgagttccaggagcggctcaaagaagatacgtcttttgggggcaacctcgggcgagcagtcttccaggccaaaaagaggcttcttgaacctcttggtctggttgaggaagcggctaagacggctcctggaaagaagagaccggtagagccatcaccccagcgttctccagactcctctacgggcatcggcaagaaaggccaacagcccgctaaaaagagactcaattttggtcagactggcgactcagagtcagtccccgacccacaacctctcggagaacctccagcaacccccgctgctgtgggacctactacaatggcttcaggcggtggcgcaccaatggcagacaataacgagggtgccgatggagtgggtaattcctcaggaaattggcattgcgattcccaatggctgggcgacagagtcatcaccaccagcaccagaacctgggccctgcccacttacaacaaccatctctacaagcaaatctccagccaatcaggagcttcaaacgacaaccactactttggctacagcaccccttgggggtattttgactttaacagattccactgccacttttcaccacgtgactggcaaagactcatcaacaacaactggggattccgacccaagagactcaacttcaagctcttcaacatccaagtcaaggaggtcacgacgaatgatggcgtcacgaccatcgctaataaccttaccagcacggttcaagtcttctcggactcggagtaccagttgccgtacgtcctcggctctgcgcaccagggctgcctccctccgttcccggcggacgtgttcatgattccgcagtacggctacctaacgctcaacaatggcagccaagccgtgggacgttcatccttttactgcctggaatatttcccttctcagatgctgagaacgggcaacaactttaccttcagctacacttttgaggacgttcctttccacagcagctacgctcacagccagagtctggaccgtctcatgaatcctctcatcgaccagtacctgtattacttgagcagaacaaacactccaagtggaaccaccacgcagtcaaggcttcagttttctcaggccggagcgagtgacattcgggaccagtctaggaactggcttcctggaccctgttaccgccagcagcgcgtttctaaaacaaaaacagacaacaacaacagcaattttacctggactggtgcttcaaaatataaccttaatgggcgtgaatctataatcaaccctggcactgctatggcctcacacaaagacgacgaagacaagttctttcccatgagcggtgtcatgatttttggaaaagagagcgccggagcttcaaacactgcattggacaatgtcatgatcacagacgaagaggaaatcaaagccactaaccccgtggccaccgaaagatttgggactgtggcagtcaatctccagagcagcagcacagaccctgcgaccggagatgtgcatgttatgggagcattacctggcatggtgtggcaagatagagacgtgtacctgcagggtcccatttgggccaaaattcctcacacagatggacactttcacccgtctcctcttatgggcggctttggactcaagaacccgcctcctcagatcctcatcaaaaacacgcctgttcctgcgaatcctccggcggagttttcagctacaaagtttgcttcattcatcacccaatactccacaggacaagtgagtgtggaaattgaatgggagctgcagaaagaaaacagcaagcgctggaatcccgaagtgcagtacacatccaattatgcaaaatctgccaacgttgattttactgtggacaacaatggactttatactgagcctcgccccattggcacccgttaccttacccgtcccctgtaa

SEQ ID NO: 721 - protein, 736 aa, synthetic construct
  source 1..736: note = Description of Artificial Sequence: Synthetic polypeptide
MAADGYLPDWLEDNLSEGIREWWDLKPGAPKPKANQQHQDNARGLVLPGYKYLGPGNGLDKGEPVNAADAAALEHDKAYDQQLKAGDNPYLKYNHADAEFQERLKEDTSFGGNLGRAVFQAKKRLLEPLGLVEEAAKTAPGKKRPVEPSPQRSPDSSTGIGKKGQQPAKKRLNFGQTGDSESVPDPQPLGEPPATPAAVGPTTMASGGGAPMADNNEGADGVGNSSGNWHCDSQWLGDRVITTSTRTWALPTYNNHLYKQISSQSGASNDNHYFGYSTPWGYFDFNRFHCHFSPRDWQRLINNNWGFRPKRLNFKLFNIQVKEVTTNDGVTTIANNLTSTVQVFSDSEYQLPYVLGSAHQGCLPPFPADVFMIPQYGYLTLNNGSQAVGRSSFYCLEYFPSQMLRTGNNFTFSYTFEDVPFHSSYAHSQSLDRLMNPLIDQYLYYLSRTNTPSGTTTQSRLQFSQAGASDIRDQSRNWLPGPCYRQQRVSKTKTDNNNSNFTWTGASKYNLNGRESIINPGTAMASHKDDEDKFFPMSGVMIFGKESAGASNTALDNVMITDEEEIKATNPVATERFGTVAVNLQSSSTDPATGDVHVMGALPGMVWQDRDVYLQGPIWAKIPHTDGHFHPSPLMGGFGLKNPPPQILIKNTPVPANPPAEFSATKFASFITQYSTGQVSVEIEWELQKENSKRWNPEVQYTSNYAKSANVDFTVDNNGLYTEPRPIGTRYLTRPL

SEQ ID NO: 722 - DNA, 2214 bp, synthetic construct; identical to SEQ ID NO: 694
  source 1..2214: mol_type = other DNA; note = Description of Artificial Sequence: Synthetic polynucleotide

SEQ ID NO: 723 - protein, 737 aa, synthetic construct; identical to SEQ ID NO: 695
  source 1..737: note = Description of Artificial Sequence: Synthetic polypeptide

SEQ ID NO: 724 - DNA, 2205 bp, synthetic construct
  source 1..2205: mol_type = other DNA; note = Description of Artificial Sequence: Synthetic polynucleotide
atggctgctgacggttatcttccagattggctcgaggacaacctttctgaaggcattcgtgagtggtgggctctgaaacctggagtccctcaacccaaagcgaaccaacaacaccaggacaaccgtcggggtcttgtgcttccgggttacaaatacctcggacccggtaacggactcgacaaaggagagccggtcaacgaggcggacgcggcagccctcgaacacgacaaggcctacgaccagcagctcaaggccggagacaacccgtacctcaagtacaaccacgccgacgccgagttccaggagcggctcaaagaagatacgtcttttgggggcaacctcgggcgagcagtcttccaggccaaaaagaggcttcttgaacctcttggtctggttgaggaagcggctaagacggctcctggaaagaagaggcctgtagagcagtctcctcaggaaccggactcctccgcgggtattggcaaatcgggtgcacagcccgctaaaaagagactcaatttcggtcagactggcgacacagagtcagtcccagaccctcaaccaatcggagaacctcccgcagccccctcaggtgtgggatctcttacaatggcttcaggtggtggcgcaccagtggcagacaataacgaaggtgccgatggagtgggtagttcctcgggaaattggcattgcgattcccaatggctgggggacagagtcatcaccaccagcacccgaacctgggccctgcccacctacaacaaccacctctacaaacaaatttccagccaatcaggagcctcgaacgacaatcactactttggctacagcaccccttgggggtattttgacttcaacagattccactgccacttttcaccacgtgactggcagcgactcatcaacaacaactggggattccggcccaagagactcagcttcaagctcttcaacatccaggtcaaagaggttacggacaacaatggagtcaagaccatcgccaataaccttaccagcacggtccaggtcttcacggactcagactatcagctcccgtacgtgctcgggtcggctcacgagggctgcctcccgccgttcccagcggacgttttcatgattcctcagtacgggtatctgacgcttaatgatggaagccaggccgtgggtcgttcgtccttttactgcctggaatatttcccgtcgcaaatgctaagaacgggtaacaacttccagttcagctacgagtttgagaacgtacctttccatagcagctacgctcacagccaaagcctggaccgactaatgaatccactcatcgaccaatacttgtactatctctcaaagactattaacggttctggacagaatcaacaaacgctaaaattcagtgtggccggacccagcaacatggctgtccagggaagaaactacatacctggacccagctaccgacaacaacgtgtctcaaccactgtgactcaaaacaacaacagcgaatttgcttggcctggagcttcttcttgggctctcaatggacgtaatagcttgatgaatcctggacctgctatggccagccacaaagaaggagaggaccgtttctttcctttgtctggatctttaatttttggcaaacaaggaactggaagagacaacgtggatgcggacaaagtcatgataaccaacgaagaagaaattaaaactactaacccggtagcaacggagtcctatggacaagtggccacaaaccaccagagtgcccaagcacaggcgcagaccggctgggttcaaaaccaaggaatacttccgggtatggtttggcaggacagagatgtgtacctgcaaggacccatttgggccaaaattcctcacacggacggcaactttcacccttctccgctgatgggagggtttggaatgaaacacccgcctcctcagatcctcatcaaaaacacacctgtacctgcggatcctccaacggccttcaacaaggacaagctgaactctttcatcacccagtattctactggccaagtcagcgtggagatcgagtgggagctgcagaaggaaaacagcaagcgctggaaccccgagatccagtacacctccaactactacaaatctacaagtgtggactttgctgttaatacagaaggcgtgtactctgaaccccgccccattggcacccgttacctcacccgtaatctgtaa

SEQ ID NO: 725 - protein, 734 aa, synthetic construct
  source 1..734: note = Description of Artificial Sequence: Synthetic polypeptide
MAADGYLPDWLEDNLSEGIREWWALKPGVPQPKANQQHQDNRRGLVLPGYKYLGPGNGLDKGEPVNEADAAALEHDKAYDQQLKAGDNPYLKYNHADAEFQERLKEDTSFGGNLGRAVFQAKKRLLEPLGLVEEAAKTAPGKKRPVEQSPQEPDSSAGIGKSGAQPAKKRLNFGQTGDTESVPDPQPIGEPPAAPSGVGSLTMASGGGAPVADNNEGADGVGSSSGNWHCDSQWLGDRVITTSTRTWALPTYNNHLYKQISSQSGASNDNHYFGYSTPWGYFDFNRFHCHFSPRDWQRLINNNWGFRPKRLSFKLFNIQVKEVTDNNGVKTIANNLTSTVQVFTDSDYQLPYVLGSAHEGCLPPFPADVFMIPQYGYLTLNDGSQAVGRSSFYCLEYFPSQMLRTGNNFQFSYEFENVPFHSSYAHSQSLDRLMNPLIDQYLYYLSKTINGSGQNQQTLKFSVAGPSNMAVQGRNYIPGPSYRQQRVSTTVTQNNNSEFAWPGASSWALNGRNSLMNPGPAMASHKEGEDRFFPLSGSLIFGKQGTGRDNVDADKVMITNEEEIKTTNPVATESYGQVATNHQSAQAQAQTGWVQNQGILPGMVWQDRDVYLQGPIWAKIPHTDGNFHPSPLMGGFGMKHPPPQILIKNTPVPADPPTAFNKDKLNSFITQYSTGQVSVEIEWELQKENSKRWNPEIQYTSNYYKSTSVDFAVNTEGVYSEPRPIGTRYLTRNL

SEQ ID NO: 726 - DNA, 2217 bp, synthetic construct
  source 1..2217: mol_type = other DNA; note = Description of Artificial Sequence: Synthetic polynucleotide
atggctgccgatggttatcttccagattggctcgaggacaacctctctgagggcattcgcgagtggtgggcgctgaaacctggagccccgaagcccaaagccaaccagcaaaagcaggacgacggccggggtctggtgcttcctggctacaagtacctcggacccttcaacggactcgacaagggggagcccgtcaacgcggcggacgcagcggccctcgagcacgacaaggcctacgaccagcagctgcaggcgggtgacaatccgtacctgcggtataaccacgccgacgccgagtttcaggagcgtctgcaagaagatacgtcttttgggggcaacctcgggcgagcagtcttccaggccaagaagcgggttctcgaacctctcggtctggttgaggaaggcgctaagacggctcctggaaagaagagaccggtagagccatcaccccagcgttctccagactcctctacgggcatcggcaagaaaggccaacagcccgccagaaaaagactcaattttggtcagactggcgactcagagtcagttccagaccctcaacctctcggagaacctccagcagcgccctctggtgtgggacctaatacaatggctgcaggcggtggcgcaccaatggcagacaataacgaaggcgccgacggagtgggtagttcctcgggaaattggcattgcgattccacatggctgggcgacagagtcatcaccaccagcacccgaacctgggccctgcccacctacaacaaccacctctacaagcaaatctccaacgggacatcgggaggagccaccaacgacaacacctacttcggctacagcaccccctgggggtattttgactttaacagattccactgccacttttcaccacgtgactggcagcgactcatcaacaacaactggggattccggcccaagagactcagcttcaagctcttcaacatccaggtcaaggaggtcacgcagaatgaaggcaccaagaccatcgccaataacctcaccagcaccatccaggtgtttacggactcggagtaccagctgccgtacgttctcggctctgcccaccagggctgcctgcctccgttcccggcggacgtgttcatgattccccagtacggctacctaacactcaacaacggtagtcaggccgtgggacgctcctccttctactgcctggaatactttccttcgcagatgctgagaaccggcaacaacttccagtttacttacaccttcgaggacgtgcctttccacagcagctacgcccacagccagagcttggaccggctgatgaatcctctgattgaccagtacctgtactacttgtctcggactcaaacaacaggaggcacggcaaatacgcagactctgggcttcagccaaggtgggcctaatacaatggccaatcaggcaaagaactggctgccaggaccctgttaccgccaacaacgcgtctcaacgacaaccgggcaaaacaacaatagcaactttgcctggactgctgggaccaaataccatctgaatggaagaaattcattggctaatcctggcatcgctatggcaacacacaaagacgacgaggagcgtttttttcccagtaacgggatcctgatttttggcaaacaaaatgctgccagagacaatgcggattacagcgatgtcatgctcaccagcgaggaagaaatcaaaaccactaaccctgtggctacagaggaatacggtatcgtggcagataacttgcagcagcaaaacacggctcctcaaattggaactgtcaacagccagggggccttacccggtatggtctggcagaaccgggacgtgtacctgcagggtcccatctgggccaagattcctcacacggacggcaacttccacccctctcccctcatgggtggattcggacttaaacatcctccgcctcagatcctgatcaagaacacgcctgtacctgcggatcctccgaccaccttcaaccagtcaaagctgaactctttcatcacgcaatacagcaccggacaggtcagcgtggaaattgaatgggagctgcagaaggaaaacagcaagcgctggaaccccgagatccagtacacctccaactactacaaatctacaagtgtggactttgctgttaatacagaaggcgtgtactctgaaccccgccccattggcacccgttacctcacccgtaatctgtaa

SEQ ID NO: 727 - protein, 738 aa, synthetic construct; identical to SEQ ID NO: 473
  source 1..738: note = Description of Artificial Sequence: Synthetic polypeptide

SEQ ID NO: 728 - DNA, 2211 bp, synthetic construct
  source 1..2211: mol_type = other DNA; note = Description of Artificial Sequence: Synthetic polynucleotide
atggctgctgacggttatcttccagattggctcgaggacaacctttctgaaggcattcgagagtggtgggcgctgcaacctggagcccctaaacccaaggcaaatcaacaacatcaggacaacgctcggggtcttgtgcttccgggttacaaatacctcggacccggcaacggactcgacaagggggaacccgtcaacgcagcggacgcggcagccctcgagcacgacaaggcctacgaccagcagctcaaggccggtgacaacccctacctcaagtacaaccacgccgacgccgagttccaggagcggctcaaagaagatacgtcttttgggggcaacctcgggcgagcagtcttccaggccaaaaagaggcttcttgaacctcttggtctggttgaggaagcggctaagacggctcctggaaagaagaggcctgtagatcagtctcctcaggaaccggactcatcatctggtgttggcaaatcgggcaaacagcctgccagaaaaagactaaatttcggtcagactggcgactcagagtcagtcccagaccctcaacctctcggagaaccaccagcagcccccacaagtttgggatctaatacaatggcttcaggcggtggcgcaccaatggcagacaataacgagggtgccgatggagtgggtaattcctcaggaaattggcattgcgattcccaatggctgggcgacagagtcatcaccaccagcaccagaacctgggccctgcccacttacaacaaccatctctacaagcaaatctccagccaatcaggagcttcaaacgacaaccactactttggctacagcaccccttgggggtattttgactttaacagattccactgccacttctcaccacgtgactggcagcgactcattaacaacaactggggattccggcccaagaaactcagcttcaagctcttcaacatccaagttaaagaggtcacgcagaacgatggcacgacgactattgccaataaccttaccagcacggttcaggtgtttacggactcggagtatcagctcccgtacgtgctcgggtcggcgcaccaaggctgtctcccgccgtttccagcggacgtcttcatggtccctcagtatggatacctcaccctgaacaacggaagtcaagcggtgggacgctcatccttttactgcctggagtacttcccttcgcagatgctaaggactggaaataacttccaattcagctataccttcgaggatgtaccttttcacagcagctacgctcacagccagagtttggatcgcttgatgaatcctcttattgatcagtatctgtactacctgaacagaacgcaaggaacaacctctggaacaaccaaccaatcacggctgctttttagccaggctgggcctcagtctatgtctttgcaggccagaaattggctacctgggccctgctaccggcaacagagactttcaaagactgctaacgacaacaacaacagtaactttccttggacagcggccagcaaatatcatctcaatggccgcgactcgctggtgaatccaggaccagctatggccagtcacaaggacgatgaagaaaaatttttccctatgcacggcaatctaatatttggcaaagaagggacaacggcaagtaacgcagaattagataatgtaatgattacggatgaagaagagattcgtaccaccaatcctgtggcaacagagcagtatggaactgtggcaaataacttgcagagctcaaatacagctcccacgactagaactgtcaatgatcagggggccttacctggcatggtgtggcaagatcgtgacgtgtaccttcaaggacctatctgggcaaagattcctcacacggatggacactttcatccttctcctctgatgggaggctttggactgaaacatccgcctcctcaaatcatgatcaaaaatactccggtaccggcaaatcctccgacgactttcagcccggccaagtttgcttcatttatcactcagtactccactggacaggtcagcgtggaaattgagtgggagctacagaaagaaaacagcaaacgttggaatccagagattcagtacacttccaactacaacaagtctgttaatgtggactttactgtagacactaatggtgtttatagtgaacctcgccccattggcacccgttaccttacccgtcccctgtaa

SEQ ID NO: 729 - protein, 736 aa, synthetic construct; identical to SEQ ID NO: 699
  source 1..736: note = Description of Artificial Sequence: Synthetic polypeptide

SEQ ID NO: 730 - DNA, 2211 bp, synthetic construct; identical to SEQ ID NO: 698
  source 1..2211: mol_type = other DNA; note = Description of Artificial Sequence: Synthetic polynucleotide

SEQ ID NO: 731 - protein, 736 aa, synthetic construct; identical to SEQ ID NO: 699
  source 1..736: note = Description of Artificial Sequence: Synthetic polypeptide

SEQ ID NO: 732 - DNA, 2211 bp, synthetic construct
  source 1..2211: mol_type = other DNA; note = Description of Artificial Sequence: Synthetic polynucleotide
atggctgctgacggttatcttccagattggctcgaggacaacctttctgaaggcattcgtgagtggtgggctctgaaacctggagtccctcaacccaaagcgaaccaacaacaccaggacaaccgtcggggtcttgtgcttccgggttacaaatacctcggacccggtaacggactcgacaaaggagagcccgtcaacgcggcggatgcagcggccctcgagcacgacaaggcctacgaccagcagctcaaagcgggtgacaatccgtacctgcggtataaccacgccgacgccgagtttcaggagcgtctgcaagaagatacgtcttttgggggcaacctcgggcgagcagtcttccaggccaagaagagggttctcgaaccttttggtctggttgaggaaggtgctaagacggctcctggaaagaaacgtccggtagagcagtcgccacaagagccagactcctcctcgggcatcggcaagacaggccagcagcccgctaaaaagagactcaattttggtcagactggcgactcagagtcagtccccgacccacaacctctcggagaacctccagcaacccccgctgctgtgggacctactacaatggcttcaggcggtggcgcaccaatggcagacaataacgaaggcgccgacggagtgggtaatgcctcaggaaattggcattgcgattccacatggctgggcgacagagtcatcaccaccagcacccgcacctgggccttgcccacctacaataaccacctctacaagcaaatctccagtgcttcaacgggggccagcaacgacaaccactacttcggctacagcaccccctgggggtattttgatttcaacagattccactgccatttctcaccacgtgactggcagcgactcatcaacaacaattggggattccggcccaagagactcaacttcaagctcttcaacatccaagtcaaggaggtcacgacgaatgatggcgtcacgaccatcgctaataaccttaccagcacggttcaagtcttctcggactcggagtaccagcttccgtacgtcctcggctctgcgcaccagggctgcctccctccgttcccggcggacgtgttcatgattccgcaatacggctacctgacgctcaacaatggcagccaagccgtgggacgttcatccttttactgcctggaatatttcccttctcagatgctgagaacgggcaacaactttaccttcagctacacctttgaggaagtgcctttccacagcagctacgcgcacagccagagcctggaccggctgatgaatcctctcatcgaccaatacctgtattacctgaacagaactcaaaatcagtccggaagtgcccaaaacaaggacttgctgtttagccgtgggtctccagctggcatgtctgttcagcccaaaaactggctacctggaccctgttatcggcagcagcgcgtttctaaaacaaaaacagacaacaacaacagcaattttacctggactggtgcttcaaaatataacctcaatgggcgtgaatccatcatcaaccctggcactgctatggcctcacacaaagacgacgaagacaagttctttcccatgagcggtgtcatgatttttggaaaagagagcgccggagcttcaaacactgcattggacaatgtcatgattacagacgaagaggaaattaaagccactaaccctgtggccaccgaaagatttgggaccgtggcagtcaatttccagagcagcagcacagaccctgcgaccggagatgtgcatgttatgggagccttacctggaatggtgtggcaagacagagacgtatacctgcagggtcctatttgggccaaaattcctcacacggatggacactttcacccgtctcctctcatgggcggctttggacttaagcacccgcctcctcagatcctcatcaaaaacacgcctgttcctgcgaatcctccggcagagttttcggctacaaagtttgcttcattcatcacccagtattccacaggacaagtgagcgtggagattgaatgggagctgcagaaagaaaacagcaaacgctggaatcccgaagtgcagtatacatctaactatgcaaaatctgccaacgttgatttcactgtggacaacaatggactttatactgagcctcgccccattggcacccgttacctcacccgtcccctgtaa

SEQ ID NO: 733 - protein, 736 aa, synthetic construct
  source 1..736: note = Description of Artificial Sequence: Synthetic polypeptide
MAADGYLPDWLEDNLSEGIREWWALKPGVPQPKANQQHQDNRRGLVLPGYKYLGPGNGLDKGEPVNAADAAALEHDKAYDQQLKAGDNPYLRYNHADAEFQERLQEDTSFGGNLGRAVFQAKKRVLEPFGLVEEGAKTAPGKKRPVEQSPQEPDSSSGIGKTGQQPAKKRLNFGQTGDSESVPDPQPLGEPPATPAAVGPTTMASGGGAPMADNNEGADGVGNASGNWHCDSTWLGDRVITTSTRTWALPTYNNHLYKQISSASTGASNDNHYFGYSTPWGYFDFNRFHCHFSPRDWQRLINNNWGFRPKRLNFKLFNIQVKEVTTNDGVTTIANNLTSTVQVFSDSEYQLPYVLGSAHQGCLPPFPADVFMIPQYGYLTLNNGSQAVGRSSFYCLEYFPSQMLRTGNNFTFSYTFEEVPFHSSYAHSQSLDRLMNPLIDQYLYYLNRTQNQSGSAQNKDLLFSRGSPAGMSVQPKNWLPGPCYRQQRVSKTKTDNNNSNFTWTGASKYNLNGRESIINPGTAMASHKDDEDKFFPMSGVMIFGKESAGASNTALDNVMITDEEEIKATNPVATERFGTVAVNFQSSSTDPATGDVHVMGALPGMVWQDRDVYLQGPIWAKIPHTDGHFHPSPLMGGFGLKHPPPQILIKNTPVPANPPAEFSATKFASFITQYSTGQVSVEIEWELQKENSKRWNPEVQYTSNYAKSANVDFTVDNNGLYTEPRPIGTRYLTRPL

SEQ ID NO: 734 - DNA, 2217 bp, synthetic construct
  source 1..2217: mol_type = other DNA; note = Description of Artificial Sequence: Synthetic polynucleotide
atggctgccgatggttatcttccagattggctcgaggacaacctctctgagggcattcgcgagtggtgggacttgaaacctggagccccgaaacccaaagccaaccagcaaaagcaggacgacggccggggtctggtgcttcctggctacaagtacctcggacccttcaacggactcgacaagggggagcccgtcaacgcggcggatgcaacggccctcgagcacgacaaggcctacgaccagcagctgcaggcgggtgacaatccgtacctgcggtataaccacgccgacgccgagtttcaggagcgtctgcaagaagatacgtcttttgggggcaacctcgggcgagcagtcttccaggccaagaagcgggttctcgaacctctcggtctggttgaggaaggcgctaagacggctcctggaaagaagagaccggtagagccatcaccccagcgttctccagactcctctacgggcatcggcaagaaaggccaacagcccgccagaaaaagactcaattttggtcagactggcgactcagagtcagttccagaccctcaacctctcggagaaccaccagcagcccccacaagtttgggatctaatacaatggcttcaggcggtggcgcaccaatggcagacaataacgagggtgccgatggagtgggtaattcctcaggaaattggcattgcgattcccaatggctgggcgacagagtcatcaccaccagcacccgcacctgggccttgcccacctacaataaccacctctacaagcaaatctccagtgcttcaacgggggccagcaacgacaaccactacttcggctacagcaccccctgggggtattttgactttaaccgcttccactgccacttctcgccaagagactggcaaagactcatcaacaacaattggggattccggcccaagagactcaacttcaaactcttcaacatccaagtcaaggaggtcacgacgaatgatggcgtcacgaccatcgccaataacctcaccagcaccatccaggtgtttacggactcggagtaccagctgccgtacgttctcggctctgcccaccagggctgcctgcctccgttcccggcggacgtgttcatgattccccagtatggatacctcaccctgaacaacggaagtcaagcggtgggacgctcatccttttactgcctggagtacttcccttcgcagatgctaaggactggaaataacttccaattcagctataccttcgaggatgtaccttttcacagcagctacgctcacagccagagtttggatcgcttgatgaatcctcttattgatcagtatctgtactacctgaacagaacgcaaggaacaacctctggaacaaccaaccaatcacggctgctttttagccaggctgggcctcagtctatgtctttgcaggccagaaattggctacctgggccctgctaccggcaacagagactttcaaagactgctaacgacaacaacaacagtaactttccttggacagcagccagcaaatatcatctcaatggccgcgactcgctggtgaatccaggaccagctatggccagtcacaaggacgatgaagaaaaatttttccctatgcacggcaatctaatatttggcaaagaagggacaacggcaagtaacgcagaattagataatgtaatgattacggatgaagaagagattcgtaccaccaatcctgtggcaacagagcagtatggaactgtggcaaataacttgcagagctcaaatacagctcccacgactagaactgtcaatgatcagggggccttacctggcatggtgtggcaagatcgtgacgtgtaccttcaggggcccatctgggcaaagattccacacacggacggacattttcacccctctcccctcatgggtggattcggacttaaacaccctcctccgcagattctcatcaagaacaccccggtacctgcgaatccttcgaccaccttcagtgcggcaaagtttgcttccttcatcacacagtactccacgggacaggtcagcgtggagatcgagtgggagctgcagaaggaaaacagcaagcgctggaacccggagatccagtacacttccaactattacaagtctaataatgttgaatttgctgttaatactgaaggtgtatatagtgaaccccgccccattggcaccagatacctgactcgtaatctgtaa

SEQ ID NO: 735 - protein, 738 aa, synthetic construct
  source 1..738: note = Description of Artificial Sequence: Synthetic polypeptide
MAADGYLPDWLEDNLSEGIREWWDLKPGAPKPKANQQKQDDGRGLVLPGYKYLGPFNGLDKGEPVNAADATALEHDKAYDQQLQAGDNPYLRYNHADAEFQERLQEDTSFGGNLGRAVFQAKKRVLEPLGLVEEGAKTAPGKKRPVEPSPQRSPDSSTGIGKKGQQPARKRLNFGQTGDSESVPDPQPLGEPPAAPTSLGSNTMASGGGAPMADNNEGADGVGNSSGNWHCDSQWLGDRVITTSTRTWALPTYNNHLYKQISSASTGASNDNHYFGYSTPWGYFDFNRFHCHFSPRDWQRLINNNWGFRPKRLNFKLFNIQVKEVTTNDGVTTIANNLTSTIQVFTDSEYQLPYVLGSAHQGCLPPFPADVFMIPQYGYLTLNNGSQAVGRSSFYCLEYFPSQMLRTGNNFQFSYTFEDVPFHSSYAHSQSLDRLMNPLIDQYLYYLNRTQGTTSGTTNQSRLLFSQAGPQSMSLQARNWLPGPCYRQQRLSKTANDNNNSNFPWTAASKYHLNGRDSLVNPGPAMASHKDDEEKFFPMHGNLIFGKEGTTASNAELDNVMITDEEEIRTTNPVATEQYGTVANNLQSSNTAPTTRTVNDQGALPGMVWQDRDVYLQGPIWAKIPHTDGHFHPSPLMGGFGLKHPPPQILIKNTPVPANPSTTFSAAKFASFITQYSTGQVSVEIEWELQKENSKRWNPEIQYTSNYYKSNNVEFAVNTEGVYSEPRPIGTRYLTRNL

SEQ ID NO: 736 - DNA, 2208 bp, synthetic construct
  source 1..2208: mol_type = other DNA; note = Description of Artificial Sequence: Synthetic polynucleotide
atggctgccgatggttatcttccagattggctcgaggacaaccttagtgaaggaattcgcgagtggtgggacttgaaacctggagccccgaagcccaaagccaaccagcaaaagcaggacgacggccggggtctggtgcttcctggctacaagtacctcggacccttcaacggactcgacaagggggagcccgtcaacgcggcggacgcagcggccctcgagcacgacaaggcctacgaccagcagctcaaagcgggtgacaatccgtacctgcggtataaccacgccgacgccgagtttcaggagcgtctgcaagaagatacgtcttttgggggcaacctcgggcgagcagtcttccaggccaagaagcgggttctcgaacctctcggtctggttgaggaaggtgctaagacggctcctggaaagaaacgtccggtagagcagtcgccacaagagccagactcctcctcgggcattggcaagacaggccagcagcccgctaaaaagagactcaattttggtcagactggcgactcagagtcagtccccgacccacaacctctcggagaacctccagcaacccccgctgctgtgggacctactacaatggcttcaggcggtggcgcaccaatggcagacaataacgaaggcgccgacggagtgggtaatgcctcaggaaattggcattgcgattccacatggctgggcgacagagtcatcaccaccagcacccgaacctgggccctgcccacctacaacaaccacctctacaaacaaatttccagccaatcaggagcctcgaacgacaatcactactttggctacagcaccccttgggggtattttgatttcaacagattccactgccacttttcaccacgtgactggcagcgactcatcaacaacaattggggattccggcccaagagactcagcttcaagctcttcaacatccaggtcaaggaggtcacgcagaatgaaggcaccaagaccatcgccaataaccttaccagcacggttcaagtgtttacggactcggagtatcagctcccgtacgtgctcggctcggcgcatcaaggatgcctcccgccgttcccagcagacgtcttcatggtgccacagtatggatacctcaccctgaacaacgggagtcaggcagtaggacgctcttcattttactgcctggagtactttccttctcagatgctgcgtaccggaaacaactttaccttcagctacacttttgaggacgttcctttccacagcagctacgctcacagccagagtctggaccgtctcatgaatcctctgattgaccagtacctgtattacttgagcagaacaaacactccaagtggaaccaccacgcagtcaaggcttcagttttctcaggccggagcgagtgacattcgggaccagtctaggaactggcttcctggaccctgttaccgccagcagcgagtatcaaagacatctgcggataacaacaacagtgaatactcgtggactggagctaccaagtaccacctcaatggcagagactctctggtgaatccgggcccggccatggcaagccacaaggactatgaagaaaagttttttcctcagagcggggttctcatctttgggaagcaaggctcagagaaaacaaatgtggacattgaaaaggtcatgattacagacgaagaggaaatcaggacaaccaatcccgtggctacggagcagtatggttctgtatctaccaacctccagagaggcaacagacaagcagctaccgcagatgtcaacacacaaggcgttcttccaggcatggtctggcaggacagagatgtgtaccttcaggggcccatctgggcaaagattccacacacggacggacattttcacccgtctccgctgatgggcggctttggcctgaaacatcctccgcctcagatcctgatcaagaacacgcctgtacctgcggatcctccgaccaccttcaaccagtcaaagctgaactctttcatcactcagtattctactggccaagtcagcgtggagatcgagtgggagctgcagaaggaaaacagcaagcgctggaaccccgagatccagtacacctccaactactacaaatctacaagtgtggactttgctgttaatacagaaggcgtgtactctgaaccccgccccattggcacccgttacctcacccgtaatctgtaa

SEQ ID NO: 737 - protein, 735 aa, synthetic construct
  source 1..735: note = Description of Artificial Sequence: Synthetic polypeptide
MAADGYLPDWLEDNLSEGIREWWDLKPGAPKPKANQQKQDDGRGLVLPGYKYLGPFNGLDKGEPVNAADAAALEHDKAYDQQLKAGDNPYLRYNHADAEFQERLQEDTSFGGNLGRAVFQAKKRVLEPLGLVEEGAKTAPGKKRPVEQSPQEPDSSSGIGKTGQQPAKKRLNFGQTGDSESVPDPQPLGEPPATPAAVGPTTMASGGGAPMADNNEGADGVGNASGNWHCDSTWLGDRVITTSTRTWALPTYNNHLYKQISSQSGASNDNHYFGYSTPWGYFDFNRFHCHFSPRDWQRLINNNWGFRPKRLSFKLFNIQVKEVTQNEGTKTIANNLTSTVQVFTDSEYQLPYVLGSAHQGCLPPFPADVFMVPQYGYLTLNNGSQAVGRSSFYCLEYFPSQMLRTGNNFTFSYTFEDVPFHSSYAHSQSLDRLMNPLIDQYLYYLSRTNTPSGTTTQSRLQFSQAGASDIRDQSRNWLPGPCYRQQRVSKTSADNNNSEYSWTGATKYHLNGRDSLVNPGPAMASHKDYEEKFFPQSGVLIFGKQGSEKTNVDIEKVMITDEEEIRTTNPVATEQYGSVSTNLQRGNRQAATADVNTQGVLPGMVWQDRDVYLQGPIWAKIPHTDGHFHPSPLMGGFGLKHPPPQILIKNTPVPADPPTTFNQSKLNSFITQYSTGQVSVEIEWELQKENSKRWNPEIQYTSNYYKSTSVDFAVNTEGVYSEPRPIGTRYLTRNL

SEQ ID NO: 738 - DNA, 2214 bp, synthetic construct
  source 1..2214: mol_type = other DNA; note = Description of Artificial Sequence: Synthetic polynucleotide
atggctgccgatggttatcttccagattggctcgaggacaacctctctgagggcattcgcgagtggtgggacttgaaacctggagccccgaaacccaaagccaaccagcaaaagcaggacgacggccggggtctggtgcttcctggctacaagtacctcggacccttcaacggactcgacaagggggagcccgtcaacgcggcggatgcagcggccctcgagcacgacaaggcctacgaccagcagctcaaagcgggtgacaatccgtacctgcggtataaccacgccgacgccgagtttcaggagcgtctgcaagaagatacgtcttttgggggcaacctcgggcgagcagtcttccaggccaagaagagggttctcgaaccttttggtctggttgaggaaggtgctaagacggctcctggaaagaaacgtccggtagagcagtcgccacaagagccagactcctcctcgggcattggcaagacaggccagcagcctgcaagaaaaagattgaattttggtcagactggagacgcagactcagtacctgacccccagcctctcggacagccaccagcagccccctctggtctgggaactaatacgatggctacaggcagtggcgcaccaatggcagacaataacgagggcgccgacggagtgggtaattcctcgggaaattggcattgcgattcccaatggctgggggacagagtcatcaccaccagcacccgaacctgggccctgcccacctacaacaatcacctctacaagcaaatctccaacagcacatctggaggatcttcaaatgacaacgcctacttcggctacagcaccccctgggggtattttgatttcaacagattccactgccatttctcaccacgtgactggcagcgactcatcaacaacaattggggattccggcccaagagactcaacttcaagctcttcaacatccaggtcaaggaggtcacgcagaatgaaggcaccaagaccatcgccaataacctcaccagcaccatccaggtgtttacggactcggagtaccagctgccgtacgttctcggctctgcccaccagggctgcctgcctccgttcccggcggacgtgttcatgattccccagtacggctacctaacactcaacaacggtagtcaggccgtgggacgctcctccttctactgcctggaatactttccttcgcagatgctgagaaccggcaacaacttccagtttacttacaccttcgaggacgtgcctttccacagcagctacgcccacagccagagcttggaccggctgatgaatcctctgattgaccagtacctgtactacttgtctcggactcaaacaacaggaggcacgacaaatacgcagactctgggcttcagccaaggtgggcctaatacaatggccaatcaggcaaagaactggctgccaggaccctgttaccgccagcagcgagtatcaaagacatttgcggataacaacaacagtgaatactcgtggactggagctaccaagtaccacctcaatggcagagactctctggtgaatccgggcccggccatggcaagccacaaggacgatgaagaaaagttttttcctcagagcggggttctcatctttgggaagcaaggctcagagaaaacaaatgtggacattgaaaaggtcatgattacagacgaagaggaaatcaggacaaccaatcccgtggctacggagcagtatggttctgtatctaccaacctccagagaggcaacagacaagcagctaccgcagatgtcaacacacaaggcgttcttccaggcatggtctggcaggacagagatgtgtaccttcaggggcccatctgggcaaagattccacacacggacggacattttcacccctctcccctcatgggtggattcggacttaaacaccctccgcctcagatcctgatcaagaacacgcctgtacccgcggatcctccgaccaccttcaaccagtcaaagctgaactctttcatcacccagtattctactggccaagtcagcgtggagatcgagtgggagctgcagaaggaaaacagcaagcgctggaaccccgagatccagtacacctccaactactacaaatctacaagtgtggactttgctgttaatacagaaggcgtgtactctgaaccccgccccattggcacccgttacctcacccgtaatctgtaa

SEQ ID NO: 739 - protein, 737 aa, synthetic construct
  source 1..737: note = Description of Artificial Sequence: Synthetic polypeptide
MAADGYLPDWLEDNLSEGIREWWDLKPGAPKPKANQQKQDDGRGLVLPGYKYLGPFNGLDKGEPVNAADAAALEHDKAYDQQLKAGDNPYLRYNHADAEFQERLQEDTSFGGNLGRAVFQAKKRVLEPFGLVEEGAKTAPGKKRPVEQSPQEPDSSSGIGKTGQQPARKRLNFGQTGDADSVPDPQPLGQPPAAPSGLGTNTMATGSGAPMADNNEGADGVGNSSGNWHCDSQWLGDRVITTSTRTWALPTYNNHLYKQISNSTSGGSSNDNAYFGYSTPWGYFDFNRFHCHFSPRDWQRLINNNWGFRPKRLNFKLFNIQVKEVTQNEGTKTIANNLTSTIQVFTDSEYQLPYVLGSAHQGCLPPFPADVFMIPQYGYLTLNNGSQAVGRSSFYCLEYFPSQMLRTGNNFQFTYTFEDVPFHSSYAHSQSLDRLMNPLIDQYLYYLSRTQTTGGTTNTQTLGFSQGGPNTMANQAKNWLPGPCYRQQRVSKTFADNNNSEYSWTGATKYHLNGRDSLVNPGPAMASHKDDEEKFFPQSGVLIFGKQGSEKTNVDIEKVMITDEEEIRTTNPVATEQYGSVSTNLQRGNRQAATADVNTQGVLPGMVWQDRDVYLQGPIWAKIPHTDGHFHPSPLMGGFGLKHPPPQILIKNTPVPADPPTTFNQSKLNSFITQYSTGQVSVEIEWELQKENSKRWNPEIQYTSNYYKSTSVDFAVNTEGVYSEPRPIGTRYLTRNL

SEQ ID NO: 740 - DNA, 2217 bp, synthetic construct
  source 1..2217: mol_type = other DNA; note = Description of Artificial Sequence: Synthetic polynucleotide
atggctgccgatggttatcttccagattggctcgaggacactctctctgaaggaataagacagtggtgggcgctgaaacctggagccccgaagcccaaagccaaccagcaaaagcaggacgacggccggggtctggtgcttcctggctacaagtacctcggacccttcaacggactcgacaagggggagcccgtcaacgcggcggatgcagcggccctcgagcacgacaaggcctacgaccagcagctcaaagcgggtgacaatccgtacctgcggtataaccacgccgacgccgagtttcaggagcgtctgcaagaagatacgtcttttgggggcaacctcgggcgagcagtcttccaggccaagaagcgggttctcgaacctctcggtctggttgaggaaggcgctaagacggctcctggaaagaagagaccggtagagccatcaccccagcgttctccagactcctctacgggcatcggcaagaaaggccaacagcccgccagaaaaagactcaattttggtcagactggcgactcagagtcagttccagaccctcaacctctcggagaaccaccagcagcccccacaagtttgggatctaatacaatggcttcaggcggtggcgcaccaatggcagacaataacgagggtgccgatggagtgggtaattcctcaggaaattggcattgcgattcccaatggctgggcgacagagtcatcaccaccagcacccgcacctgggccttgcccacctacaataaccacctctacaagcaaatctccagtgcttcaacgggggccagcaacgacaaccactacttcggctacagcaccccctgggggtattttgactttaaccgcttccactgccacttctcgccaagagactggcaaagactcatcaacaacaattggggattccggcccaagagactcaacttcaaactcttcaacatccaagtcaaggaggtcacgacgaatgatggcgtcacgaccatcgccaataacctcaccagcaccatccaggtgtttacggactcggagtaccagctgccgtacgttctcggctctgcccaccagggctgcctgcctccgttcccggcggacgtgttcatgattccccagtatggatacctcaccctgaacaacggaagtcaagcggtgggacgctcatccttttactgcctggagtacttcccttcgcagatgctaaggactggaaataacttccaattcagctataccttcgaggatgtaccttttcacagcagctacgctcacagccagagtttggatcgcttgatgaatcctcttattgatcagtatctgtactacctgaacagaacgcaaggaacaacctctggaacaaccaaccaatcacggctgctttttagccaggctgggcctcagtctatgtctttgcaggccagaaattggctacctgggccctgctaccggcaacagagactttcaaagactgctaacgacaacaacaacagtaactttccttggacagcagccagcaaatatcatctcaatggccgcgactcgctggtgaatccaggaccagctatggccagtcacaaggacgatgaagaaaaatttttccctatgcacggcaatctaatatttggcaaagaagggacaacggcaagtaacgcagaattagataatgtaatgattacggatgaagaagagattcgtaccaccaatcctgtggcaacagagcagtatggaactgtggcaaataacttgcagagctcaaatacagctcccacgactagaactgtcaatgatcagggggccttacctggcatggtgtggcaagatcgtgacgtgtaccttcaggggcccatctgggcaaagattccacacacggacggacattttcacccctctcccctcatgggtggattcggacttaaacaccctcctccgcagattctcatcaagaacaccccggtacctgcgaatccttcgaccaccttcagtgcggcaaagtttgcttccttcatcacacagtactccacgggacaggtcagcgtggagatcgagtgggagctgcagaaggaaaacagcaagcgctggaacccggagatccagtacacttccaactattacaagtctaataatgttgaatttgctgttaatactgaaggtgtatatagtgaaccccgccccattggcaccagatacctgactcgtaatctgtaa

SEQ ID NO: 741 - protein, 738 aa, synthetic construct
  source 1..738: note = Description of Artificial Sequence: Synthetic polypeptide
MAADGYLPDWLEDTLSEGIRQWWALKPGAPKPKANQQKQDDGRGLVLPGYKYLGPFNGLDKGEPVNAADAAALEHDKAYDQQLKAGDNPYLRYNHADAEFQERLQEDTSFGGNLGRAVFQAKKRVLEPLGLVEEGAKTAPGKKRPVEPSPQRSPDSSTGIGKKGQQPARKRLNFGQTGDSESVPDPQPLGEPPAAPTSLGSNTMASGGGAPMADNNEGADGVGNSSGNWHCDSQWLGDRVITTSTRTWALPTYNNHLYKQISSASTGASNDNHYFGYSTPWGYFDFNRFHCHFSPRDWQRLINNNWGFRPKRLNFKLFNIQVKEVTTNDGVTTIANNLTSTIQVFTDSEYQLPYVLGSAHQGCLPPFPADVFMIPQYGYLTLNNGSQAVGRSSFYCLEYFPSQMLRTGNNFQFSYTFEDVPFHSSYAHSQSLDRLMNPLIDQYLYYLNRTQGTTSGTTNQSRLLFSQAGPQSMSLQARNWLPGPCYRQQRLSKTANDNNNSNFPWTAASKYHLNGRDSLVNPGPAMASHKDDEEKFFPMHGNLIFGKEGTTASNAELDNVMITDEEEIRTTNPVATEQYGTVANNLQSSNTAPTTRTVNDQGALPGMVWQDRDVYLQGPIWAKIPHTDGHFHPSPLMGGFGLKHPPPQILIKNTPVPANPSTTFSAAKFASFITQYSTGQVSVEIEWELQKENSKRWNPEIQYTSNYYKSNNVEFAVNTEGVYSEPRPIGTRYLTRNL

SEQ ID NO: 742 - DNA, 2208 bp, synthetic construct; identical to SEQ ID NO: 378
  source 1..2208: mol_type = other DNA; note = Description of Artificial Sequence: Synthetic polynucleotide

SEQ ID NO: 743 - protein, 735 aa, synthetic construct [sequence omitted]

SEQ ID NO: 744 - DNA, 2208 bp, synthetic construct
  source 1..2208: mol_type = other DNA; note = Description of Artificial Sequence: Synthetic polynucleotide
atggctgccgatggttatcttccagattggctcgaggacaacctctctgagggcattcgcgagtggtgggcgctgaaacctggagccccgaagcccaaagccaaccagcaaaagcaggacgacggccggggtctggtgcttcctggctacaagtacctcggacccttcaacggactcgacaagggggagcccgtcaacgcggcggacgccgcggccctcgagcacgacaaggcctacgaccagcagctgcaggcgggtgacaatccgtacctgcggtataaccacgccgacgccgagtttcaggagcgtctgcaagaagatacgtcttttgggggcaacctcgggcgagcagtcttccaggccaaaaagaggcttcttgaacctcttggtctggttgaggaagcagctaaaacggctcctggaaagaagaggcctgtagagcagtctcctcaggaaccggactcctccgcgggtattggcaaatcgggtgcacagcccgccaaaaagagactcaatttcggtcagactggcgactcagagtcagtcccagaccctcaacctctcggagaaccaccagcagcccccacaagtttgggatctaatacaatggcttcaggcggtggcgcaccaatggcagacaataacgaaggcgccgacggagtgggtaatgcctcaggaaattggcattgcgattccacatggctgggcgacagagtcatcaccaccagcacccgcacctgggccttgcccacctacagcaaccatctctacaagcaaatctccagccaatcaggagcttcaaacgacaacgactactttggctacagcaccccttgggggtattttgatttcaacagattccactgccacttttcaccacgtgactggcaaagactcatcaacaacaactggggattccgacccaagagactcaacttcaagctctttaacattcaagtcaaagaggtcacgcagaatgacggtacgacgacgattgccaataaccttaccagcacggttcaggtgtttactgactcggagtaccagctcccgtacgtcctcggctcggcgcatcaaggatgcctcccgccgttcccagcagacgtcttcatggtgccacagtatggatacctcaccctgaacaacgggagtcaggcagtaggacgctcttcattttactgcctggagtactttccttctcagatgctgcgtaccggaaacaactttaccttcagctacacttttgaggacgttcctttccacagcagctacgctcacagccagagtctggaccgtctcatgaatcctctcatcgaccagtacctgtattacttgagcagaacaaacactccaagtggaaccaccacgcagtcaaggcttcagttttctcaggccggagcgagtgacattcgggaccagtctaggaactggcttcctggaccctgttaccgccagcagcgagtatcaaagacatctgaggataacaacaacagtgaatactcgtggactggagctaccaagtaccacctcaatggcagagactctctggtgaatccgggcccggccatggcaagccacaaggacgatgaagaaaagttttttcctcagagcggggttctcatctttgggaagcaaggctcagagaaaacaaatgtggacattgaaaaggtcatgattacagacgaagaggaaatcaggacaaccaatcccgtggctacggagcagtatggttctgtatctaccaacctccagagaggcaacagacaagcagctaccgcagatgtcaacacacaaggcgttcttccaggcatggtctggcaggacagagatgtgtaccttcaggggcccatctgggcaaagattccacacacggacggacattttcacccctctcccctcatgggtggattcggacttaaacaccctcctccacagattctcatcaagaacaccccggtacctgcgaatccttcgaccaccttcagtgcggcaaagtttgcttccttcatcacacagtactccacgggacaggtcagcgtggagatcgagtgggagctgcagaaggaaaacagcaaacgctggaatcccgaaattcagtacacttccaactacaacaagtctgttaatgtggactttactgtggacactaatggcgtgtattcagagcctcgccccattggcaccagatacctgactcgtaatctgtaa

SEQ ID NO: 745 - protein, 735 aa, synthetic construct
  source 1..735: note = Description of Artificial Sequence: Synthetic polypeptide
MAADGYLPDWLEDNLSEGIREWWALKPGAPKPKANQQKQDDGRGLVLPGYKYLGPFNGLDKGEPVNAADAAALEHDKAYDQQLQAGDNPYLRYNHADAEFQERLQEDTSFGGNLGRAVFQAKKRLLEPLGLVEEAAKTAPGKKRPVEQSPQEPDSSAGIGKSGAQPAKKRLNFGQTGDSESVPDPQPLGEPPAAPTSLGSNTMASGGGAPMADNNEGADGVGNASGNWHCDSTWLGDRVITTSTRTWALPTYSNHLYKQISSQSGASNDNDYFGYSTPWGYFDFNRFHCHFSPRDWQRLINNNWGFRPKRLNFKLFNIQVKEVTQNDGTTTIANNLTSTVQVFTDSEYQLPYVLGSAHQGCLPPFPADVFMVPQYGYLTLNNGSQAVGRSSFYCLEYFPSQMLRTGNNFTFSYTFEDVPFHSSYAHSQSLDRLMNPLIDQYLYYLSRTNTPSGTTTQSRLQFSQAGASDIRDQSRNWLPGPCYRQQRVSKTSEDNNNSEYSWTGATKYHLNGRDSLVNPGPAMASHKDDEEKFFPQSGVLIFGKQGSEKTNVDIEKVMITDEEEIRTTNPVATEQYGSVSTNLQRGNRQAATADVNTQGVLPGMVWQDRDVYLQGPIWAKIPHTDGHFHPSPLMGGFGLKHPPPQILIKNTPVPANPSTTFSAAKFASFITQYSTGQVSVEIEWELQKENSKRWNPEIQYTSNYNKSVNVDFTVDTNGVYSEPRPIGTRYLTRNL

SEQ ID NO: 746 - DNA, 2208 bp, synthetic construct
  source 1..2208: mol_type = other DNA; note = Description of Artificial Sequence: Synthetic polynucleotide
atggctgccgatggttatcttccagattggctcgaggacaacctctctgagggcattcgcgagtggtgggcgctgaaacctggagccccgaagcccaaagccaaccagcaaaagcaggacgacggccggggtctggtgcttcctggctacaagtacctcggacccttcaacggactcgacaagggggagcccgtcaacgcggcggacgcagcggccctcgagcacgacaaggcctacgaccagcagctgcaggcgggtgacaatccgtacctgcggtataaccacgccgacgccgagttccaggagcgtctgcaagaagatacgtcttttgggggcaacctcgggcgagcagtcttccaggccaagaagagggttctcgaaccttttggtctggttgaggaaggtgctaagacggctcctggaaagaaacgtccggtagagcagtcgccacaagagccagactcctcctcgggcattggcaagacaggccagcagcccgctaaaaagagactcaattttggtcagactggcgactcagagtcagtcccagaccctcaacctctcggagaaccaccagcagcccccacaagtttgggatctaatacaatggcttcaggcggtggcgcaccaatggcagacaataacgagggcgccgacggagtgggtaattcctcgggaaattggcattgcgattccacatggatgggcgacagagtcatcaccaccagcacccgaacctgggccctgcccacctacaacaaccacctctacaaacaaatttccagccaatcaggagcttcaaacgacaaccactactttggctacagcaccccttgggggtattttgactttaacagattccactgccacttttcaccacgtgactggcagcgactcattaacaacaactggggattccggcccaagaaactcaacttcaagctctttaacatccaggtcaaggaggtcacgcagaatgaaggcaccaagaccatcgccaataacctcaccagcaccatccaggtgtttacggactcggagtaccagctgccgtacgttctcggctctgcccaccagggctgcctgcctccgttcccggcggacgtgttcatgattccccagtacggctacctaacactcaacaacggtagtcaggccgtgggacgctcctccttctactgcctggaatactttccttcgcagatgctgagaaccggcaacaacttccagtttacttacaccttcgaggacgtgcctttccacagcagctacgcccacagccagagcttggaccggctgatgaatcctctgattgaccagtacctgtattacttgtctcggactcaaacaacaggaggcacgacaaatacgcagactctgggcttcagccaaggtgggcctaatacaatggccaatcaggcaaagaactggctgcctggaccctgttaccgccagcagcgagtatcaaagacatctgcggataacaacaacagtgaatactcgtggactggagctaccaagtaccacctcaatggcagagactctctggtgaatccgggcccggccatggcaagccacaaggacgatgaagaaaagttttttcctcagagcggggttctcatctttgggaagcaaggctcagagaaaacaaatgtggacattgaaaaggttatgattacagacgaagaggaaatcaggacaaccaatcccgtggctacggagcagtatggttctgtatctaccaacctccagagaggcaacagacaagcagctaccgcagatgtcaacacacagggcgttcttccaggcatggtctggcaggacagagatgtgtaccttcagggtcccatttgggccaaaattcctcacacagatggacactttcacccgtcccctcttatgggcggctttggactcaagaacccgcctcctcagatcctcatcaaaaacacgcctgttcctgcgaatcctccggcagagttttcagctacaaagtttgcttcattcatcacccaatactccacaggacaagtgagtgtggaaattgaatgggagctgcagaaagaaaacagcaagcgctggaatcccgaagtgcagtacacatccaattatgcaaaatctgccaacgttgattttactgtggacactaatggcgtgtattcagagcctcgccccattggcaccagatacctcacccgtaatctgtaa

SEQ ID NO: 747 - protein, 735 aa, synthetic construct
  source 1..735: note = Description of Artificial Sequence: Synthetic polypeptide
MAADGYLPDWLEDNLSEGIREWWALKPGAPKPKANQQKQDDGRGLVLPGYKYLGPFNGLDKGEPVNAADAAALEHDKAYDQQLQAGDNPYLRYNHADAEFQERLQEDTSFGGNLGRAVFQAKKRVLEPFGLVEEGAKTAPGKKRPVEQSPQEPDSSSGIGKTGQQPAKKRLNFGQTGDSESVPDPQPLGEPPAAPTSLGSNTMASGGGAPMADNNEGADGVGNSSGNWHCDSTWMGDRVITTSTRTWALPTYNNHLYKQISSQSGASNDNHYFGYSTPWGYFDFNRFHCHFSPRDWQRLINNNWGFRPKKLNFKLFNIQVKEVTQNEGTKTIANNLTSTIQVFTDSEYQLPYVLGSAHQGCLPPFPADVFMIPQYGYLTLNNGSQAVGRSSFYCLEYFPSQMLRTGNNFQFTYTFEDVPFHSSYAHSQSLDRLMNPLIDQYLYYLSRTQTTGGTTNTQTLGFSQGGPNTMANQAKNWLPGPCYRQQRVSKTSADNNNSEYSWTGATKYHLNGRDSLVNPGPAMASHKDDEEKFFPQSGVLIFGKQGSEKTNVDIEKVMITDEEEIRTTNPVATEQYGSVSTNLQRGNRQAATADVNTQGVLPGMVWQDRDVYLQGPIWAKIPHTDGHFHPSPLMGGFGLKNPPPQILIKNTPVPANPPAEFSATKFASFITQYSTGQVSVEIEWELQKENSKRWNPEVQYTSNYAKSANVDFTVDTNGVYSEPRPIGTRYLTRNL

SEQ ID NO: 748 - DNA, 2214 bp, synthetic construct; identical to SEQ ID NO: 738
  source 1..2214: mol_type = other DNA; note = Description of Artificial Sequence: Synthetic polynucleotide

SEQ ID NO: 749 - protein, 737 aa, synthetic construct; identical to SEQ ID NO: 739
  source 1..737: note = Description of Artificial Sequence: Synthetic polypeptide

SEQ ID NO: 750 - DNA, 2196 bp, unidentified
  source 1..2196: mol_type = unassigned DNA; note = Adeno-associated virus
atggctgctgacggttatcttccagattggctcgaggacaacctctctgagggcattcgcgagtggtgggcgctgaaacctggagccccgcaacccaaagccaaccagcaaaagcaggacgacggccggggtctggtgcttcctggctacaagtacctcggacccttcaacggactcgacaagggggagcccgtcaacgaggcggacgccgcggccctcgagcacgacaaggcctacgaccagcagctcaaagcgggtgacaatccgtacctgcggtataatcacgccgacgccgagtttcaagagcgtctgcaagaagatacgtcctttgggggcaacctcgggcgagcagtcttccaggccaaaaagagggtactcgagcctctgggtctggttgaggaaggcgctaagacggctcctggaaagaagcggccagtagaaccggactccagctcgggcatcggcaagtcaggccagcagcccgcgaaaaagagactgaattttgggcagactggcgactcagagtcagtgcctgacccccaacctctctcagaaccacccgcaggtccctctggtctgggatctggtacaatggctgctggcggtggcgctccaatggcagacaataacgaaggcgccgacggagtgggtaatgtctcaggaaattggcattgcgattccacatggctgggcgaccgagtcatcaccaccagcactcggacctgggccctccccacctacaacaaccacctctacaagcaaatctccaacgggacctcgggaggcagcagcaacgacaacacctactttggctacagcaccccctgggggtattttgactttaacagattccactgccacttttcaccacgtgactggcagcgactcatcaacaacaactgggggttccggcccaagaagctcaacttcaagctcttcaacatccaggtcaaggaggtcacccagaatgaaggcaccaagaccatcgccaataacctcaccagcacggtgcaggtctttacggactcggagtaccagctcccgtacgtgctcggctctgcccaccagggctgcctgcctccgttcccggcggacgtgttcatgattccgcagtacgggtacctgacgctgaacaacgggagccaggccgtggggcgatcctccttctactgcctggagtactttccctcgcagatgctgagaacgggcaacaactttaccttcagctacaccttcgaggacgtgcccttccacagcagctacgcgcacagccagagcctggaccggctgatgaacccgctgattgaccagtacctgtactacctgtctcggactcagaccaacgggaccaatgccacgcagactctgttgtttgctcaggccgggcctcagaacatgtcggctcaggccaagaactggctgcctggtccttgctatcggcagcagcgcgtctctacgacagtgtcgcaaaacaacaacagcaactttacctggaccggggcgaccaagtaccacctgaacggccgagactccctggtgagccccggtgtcgccatggcaacgcacaaggacgacgaggagcgcttcttcccgagcagcggggtcctgatgtttggcaagcagggcgctggaaaggacaatgtcgagtacaccaacgtgatgctcaccagcgaggaggagatcaagaccaccaaccctgtggccacggagcagtacggcgtggtggctgacaatctgcagcagaccaactcagctcccattgtgggggcagtcaacagccagggggccttacccggtatggtctggcagaaccgggacgtgtacctgcagggtcccatctgggccaagatcccgcatacggacggcaactttcacccgtctcctctcatgggcggctttggactgaaacacccgcctccccagatcctgatcaaaaacacgccggtacctgcggatcccccggtgaactttacggacgctaagctggcgagtttcatcacgcagtacagcaccgggcaggtcagcgtggagattgagtgggagctgcagaaggagaacagcaagcgctggaatcccgagattcagtacacttccaattattataaatcagctaatgtggactttgccgtcaatgcagatggtgtatatagtgaaccccgccccattggcactcgttacctcacccgtaatctgtaa

SEQ ID NO: 751 - protein, 731 aa, unidentified
  source 1..731: note = Adeno-associated virus
MAADGYLPDWLEDNLSEGIREWWALKPGAPQPKANQQKQDDGRGLVLPGYKYLGPFNGLDKGEPVNEADAAALEHDKAYDQQLKAGDNPYLRYNHADAEFQERLQEDTSFGGNLGRAVFQAKKRVLEPLGLVEEGAKTAPGKKRPVEPDSSSGIGKSGQQPAKKRLNFGQTGDSESVPDPQPLSEPPAGPSGLGSGTMAAGGGAPMADNNEGADGVGNVSGNWHCDSTWLGDRVITTSTRTWALPTYNNHLYKQISNGTSGGSSNDNTYFGYSTPWGYFDFNRFHCHFSPRDWQRLINNNWGFRPKKLNFKLFNIQVKEVTQNEGTKTIANNLTSTVQVFTDSEYQLPYVLGSAHQGCLPPFPADVFMIPQYGYLTLNNGSQAVGRSSFYCLEYFPSQMLRTGNNFTFSYTFEDVPFHSSYAHSQSLDRLMNPLIDQYLYYLSRTQTNGTNATQTLLFAQAGPQNMSAQAKNWLPGPCYRQQRVSTTVSQNNNSNFTWTGATKYHLNGRDSLVSPGVAMATHKDDEERFFPSSGVLMFGKQGAGKDNVEYTNVMLTSEEEIKTTNPVATEQYGVVADNLQQTNSAPIVGAVNSQGALPGMVWQNRDVYLQGPIWAKIPHTDGNFHPSPLMGGFGLKHPPPQILIKNTPVPADPPVNFTDAKLASFITQYSTGQVSVEIEWELQKENSKRWNPEIQYTSNYYKSANVDFAVNADGVYSEPRPIGTRYLTRNL

SEQ ID NO: 752 - DNA, 2196 bp, unidentified
  source 1..2196: mol_type = unassigned DNA; note = Adeno-associated virus
atggctgctgacggttatcttccagattggctcgaggacaacctctctgagggcattcgcgagtggtgggcgctgaaacctggagccccgcaacccaaagccaaccagcaaaagcaggacgacggccggggtctggtgcttcctggctacaagtacctcggacccttcaacggactcgacaagggggagcccgtcaacgaggcggacgccgcggccctcgagcacgacaaggcctacgaccagcagctcaaagcgggtgacaatccgtacctgcggtataatcacgccgacgccgagtttcaagagcgtctgcaagaagatacgtcctttgggggcaacctcgggcgagcagtcttccaggccaaaaagagggtactcgagcctctgggtctggttgaggaaggcgctaagacggctcctggaaagaagcggccagtagaaccggactccagctcgggcatcggcaagtcaggccggcagcccgcgaaaaagagactgaattttgggcagactggcgactcagagtcagtgcctgacccccaacctctctcagaaccacccgcaggtccctctggtctgggatctggtacaatggctgcaggcggtggcgctccaatggcagacaataacgaaggcgccgacggagtgggtaatgcctcaggaaattggcattgcgattccacatggctgggcgaccgagtcatcaccaccagcactcggacctgggccctccccacctacaacaaccacctctacaagcaaatctccaacgggacctcgggaggcagcagcaacgacaacacctactttggctacagcaccccctgggggtattttgactttaacagattccactgccacttttcaccacgtgactggcagcgactcatcaacaacaactggggattccggcccaagaggctcaacttcaagctcttcaacatccaggtcaaggaggtcacccagaatgaaggcaccaagaccatcgccaataacctcaccagcacggtgcaggtctttacggactcgaagtaccagctcccgtacgtgctcggctctgcccaccagggctgcctgcctccgttcccggcggacgtgttcatgattccgcagtacgggtacctgacgctgaacaacgggagccaggccgtggggcgatcctccttctactgcctggagtactttccctcgcagatgctgagaacgggcaacaactttaccttcagctacaccttcgaggacgtgcccttccacagcagctacgcgcacagccagagcctggaccggctgatgaacccgctgattgaccagtacctgtactacctgtctcggactcagaccaacgggaccaatgccacgcagactctgttgtttgctcaggccgggcctcagaacatgtcggctcaggccaagaactggctgcctggtccttgctatcggcagcagcgcgtctctacgacagtgtcgcaaaacaacaacagcaactttacctggaccggggcgaccaagtaccacctgaacggccgagactccctggtgaaccccggtgtcgccatggcaacgcacaaggacgacgaggagcgcttcttcccgagcagcggggtcctgatgtttggcaagcagggcgctggaaaggacaatgtcgagtacaccaacgtgatgctcaccagcgaggaggagatcaagaccaccaaccctgtggccacggagcagtacggtgtggtggctgacaatctgcagcagaccaactcggctcccattgtgggggcagtcaacagccagggggccttacccggtatggtctggcagaaccgggacgtgtacctgcagggtcccatctgggccaagatcccgcatacggacggcaactttcacccgtctcctctcatgggcggctttggactgaaacacccgcctccccagatcctgatcaaaaacacgccggtacctgcggatcccccggtgaactttacggacgctaagctggcgagtttcatcacgcagtacagcaccgggcaggtcagcgtggagattgagtgggagctgcagaaggagaacagcaagcgctggaatcccgagattcagtacacttccaattattataaatcagctaatgtggactttgccgtcaatgcagatggtgtatatagtgaaccccgccccattggcactcgttacctcacccgtaatctgtaa

SEQ ID NO: 753 - protein, 731 aa, unidentified
  source 1..731: note = Adeno-associated virus
MAADGYLPDWLEDNLSEGIREWWALKPGAPQPKANQQKQDDGRGLVLPGYKYLGPFNGLDKGEPVNEADAAALEHDKAYDQQLKAGDNPYLRYNHADAEFQERLQEDTSFGGNLGRAVFQAKKRVLEPLGLVEEGAKTAPGKKRPVEPDSSSGIGKSGRQPAKKRLNFGQTGDSESVPDPQPLSEPPAGPSGLGSGTMAAGGGAPMADNNEGADGVGNASGNWHCDSTWLGDRVITTSTRTWALPTYNNHLYKQISNGTSGGSSNDNTYFGYSTPWGYFDFNRFHCHFSPRDWQRLINNNWGFRPKRLNFKLFNIQVKEVTQNEGTKTIANNLTSTVQVFTDSKYQLPYVLGSAHQGCLPPFPADVFMIPQYGYLTLNNGSQAVGRSSFYCLEYFPSQMLRTGNNFTFSYTFEDVPFHSSYAHSQSLDRLMNPLIDQYLYYLSRTQTNGTNATQTLLFAQAGPQNMSAQAKNWLPGPCYRQQRVSTTVSQNNNSNFTWTGATKYHLNGRDSLVNPGVAMATHKDDEERFFPSSGVLMFGKQGAGKDNVEYTNVMLTSEEEIKTTNPVATEQYGVVADNLQQTNSAPIVGAVNSQGALPGMVWQNRDVYLQGPIWAKIPHTDGNFHPSPLMGGFGLKHPPPQILIKNTPVPADPPVNFTDAKLASFITQYSTGQVSVEIEWELQKENSKRWNPEIQYTSNYYKSANVDFAVNADGVYSEPRPIGTRYLTRNL

SEQ ID NO: 754 - DNA, 2196 bp, unidentified
  source 1..2196: mol_type = unassigned DNA; note = Adeno-associated virus
atggctgctgacggttatcttccagattggctcgaggacaacctctctgagggcattcgcgagtggtgggcgctgaaacctggagccccgcaacccaaagccaaccagcaaaagcaggacgacggccggggtctggtgcttcctggctacaagtacctcggacccttcaacggactcgacaagggggagcccgtcaacgaggcggacgccgcggccctcgagcacgacaaggcctacgaccagcagctcaaagcgggtgacaatccgtacctgcggtataatcacgccgacgccgagtttcaagagcgtctgcaagaagatacgtcctttgggggcaacctcgggcgagcagtcttccaggccaaaaagagggtactcgagcctctgggtctggttgaggaaggcgctaagacggctcctggaaagaagcggccagtagaaccggactccagctcgggcatcggcaagtcaggccagcagcccgcgaaaaagagactgaattttgggccgactggcgactcagagtcagtgcctgacccccaacctctctcagaaccacctgcaggtccctctggtctgggatctggtacaatggctgcaggcggtggcgctccaatggcagacaataacgaaggcgccgacggagtgggtaatgtctcaggaaattggcattgcgattccacatggctgggcgaccgagtcatcaccaccagcactcggacctgggccctccccacctacaacaaccacctctacaagcaaatctccaacgggacctcgggaggcagcagcaacgacaacacctactttggctacagcaccccctgggggtattttgactttaacagattccactgccacttttcaccacgcgactggcagcgactcatcaacaacaactggggattccggcccaagaagctcaacttcaagctcttcaacatccaggtcaaggaggtcacccagaatgaaggcaccaagaccaccgccaataacctcaccagcacggtgcaggtctttacggactcggagtaccagctcccgtacgtgctcggctctgcccaccagggctgcctgcctccgttcccggcggacgtgttcatgattccgcagtacgggtacctgacgctgaacaacgggagccaggccgtggggcgatcctccttctactgcctggagtactttccctcgcagatgctgagaacgggcaacaactttaccttcagctacaccttcgaggacgtgcccttccacagcagctacgcgcacagccagagcctggaccggctgatgaacccgctgattgaccagtacctgtactacctgtctcggactcagaccaacgggaccaatgccacgcagactctgttgtttgctcaggccgggcctcagaacatgtcggctcaggccaagaactggctgcctggtccttgctatcggcagcagcgcgtctctacggcagtgtcgcaaaacaacaacagcaactttacctggaccggggcgaccaagtaccacctgaacggccgagactccctggtgaaccccggtgtcgccatggcaacgcacaaggacgacgaggagcgcttcttcccgagcagcggggtcctgatgtttggcaagcagggcgctggaaaggacaatgtcgagtacaccaacgtgatgctcaccagcgaggaggagatcaagaccaccaaccctgtggccacggagcagtacggtgtggtggctgacaatctgcagcagaccaactcggctcccattgtgggggcagtcaacagccagggggccttacccggtatggtctggcagaaccgggacgtgtacctgcagggtcccatctgggccaagatcccgcatacggacggcaactttcacccgtctcctctcatgggcggctttggactgaaacacccgcctccccagatcctgatcaaaaacacgccggtacctgcggatcccccggtgaactttacggacgctaagctggcgagtttcatcacgcagtacagcaccgggcaggtcagcgtggagattgagtgggagctgcagaaggagaacagcaagcgctggaatcccgagattcagtacacttccaattattataaatcagctaatgtggactttgccgtcaatgcagatggtgtatatagcgaaccccgccccattggcactcgttacctcacccgtaatctgtaa

SEQ ID NO: 755 - protein, 731 aa, unidentified
  source 1..731: note = Adeno-associated virus
MAADGYLPDWLEDNLSEGIREWWALKPGAPQPKANQQKQDDGRGLVLPGYKYLGPFNGLDKGEPVNEADAAALEHDKAYDQQLKAGDNPYLRYNHADAEFQERLQEDTSFGGNLGRAVFQAKKRVLEPLGLVEEGAKTAPGKKRPVEPDSSSGIGKSGQQPAKKRLNFGPTGDSESVPDPQPLSEPPAGPSGLGSGTMAAGGGAPMADNNEGADGVGNVSGNWHCDSTWLGDRVITTSTRTWALPTYNNHLYKQISNGTSGGSSNDNTYFGYSTPWGYFDFNRFHCHFSPRDWQRLINNNWGFRPKKLNFKLFNIQVKEVTQNEGTKTTANNLTSTVQVFTDSEYQLPYVLGSAHQGCLPPFPADVFMIPQYGYLTLNNGSQAVGRSSFYCLEYFPSQMLRTGNNFTFSYTFEDVPFHSSYAHSQSLDRLMNPLIDQYLYYLSRTQTNGTNATQTLLFAQAGPQNMSAQAKNWLPGPCYRQQRVSTAVSQNNNSNFTWTGATKYHLNGRDSLVNPGVAMATHKDDEERFFPSSGVLMFGKQGAGKDNVEYTNVMLTSEEEIKTTNPVATEQYGVVADNLQQTNSAPIVGAVNSQGALPGMVWQNRDVYLQGPIWAKIPHTDGNFHPSPLMGGFGLKHPPPQILIKNTPVPADPPVNFTDAKLASFITQYSTGQVSVEIEWELQKENSKRWNPEIQYTSNYYKSANVDFAVNADGVYSEPRPIGTRYLTRNL

SEQ ID NO: 756 - DNA, 4404 bp, unidentified
  source 1..4404: mol_type = unassigned DNA; note = Adeno-associated virus
atggctgccgatggttatcttccagattggctcgagggcaacctctctgagggcattcgcgagtggtgggacttgaaacctggagccccgaaacccaaagccaaccagcaaaagcaggacgacggccggggtctggtgcttcctggctacaggtacctcggacccttcaacggactcgacaagggagagccggtcaacgaggcagacgccgcggccctcgagcacgacaaggcctacgacaagcagctcgagcagggggacaacccgtacctcaagtacaaccacgccgacgccgagtttcaggagcgtcttcaagaagatacgtcttttgggggcaacctcgggcgagcagtcttccaggccaagaagcgggttctcgaacctctcggtctggttgaggaaggcgctaagacggctcctggaaagaagagacccatagaatcccccgactcctccacgggcatcggcaagaacggccagccgcccgctaaaaagaagctcaactttgggcagactggcgactcagagtcagtgcccgacccccaacctctcggagaacctcccgccgcgccctcaggtctgggatctggtacaatggctgcaggcggtggcgcaccaatggcagacaataacgaaggcgccgacggagtgggtaatgcctccggaaattggcattgcgattccacatggctgggcgacagagtcatcaccaccagcacccgcacctgggccctgcccacctacaacaaccacctctacaagcagatatcaagtcagagcggggctaccaacgacaaccacttcttcggctacagcaccccctggggctattttgacttcaacagattccactgccacttctcaccacgtgactggcagcgactcatcaacaacaactggggattccggcccagaaagctgcggttcaagttgttcaacatccaggtcaaggaggtcacgacgaacgacggcgttacgaccatcgctaataaccttaccagcacgattcaggtcttctcggactcggagtaccaactgccgtacgtcctcggctctgcgcaccagggctgcctccctccgttccctgcggacgtgttcatgattcctcagtacggatatctgactctaaacaacggcagtcagtctgtgggacgttcctccttctactgcctggagtactttccttctcagatgctgagaacgggcgataactttgaattcagctacacctttgaggaagtgcctttccacagcagctatgcgcacagccagagcctggaccggctgatgaatcccctcatcgaccagtacctgtactacctggcccggacccagagcactacggggtccacaagggagctgcagttccatcaggctgggcccaacaccatggccgagcaatcaaagaactggctgcccggaccctgttatcggcagcagagactgtcaaaaaacatagacagcaacaacaacagtaactttgcctggaccggggccactaaataccatctgaatggtagaaattcattaaccaacccgggcgtagccatggccaccaacaaggacgacgaggaccagttctttcccatcaacggagtgctggtttttggcaaaacgggggctgccaacaagacaacgctggaaaacgtgctaatgaccagcgaggaggagatcaaaaccaccaatcccgtggctacagaagaatacggtgtggtctccagcaacctgcaatcgtctacggccggaccccagacacagactgtcaacagccagggggctctgcccggcatggtctggcagaaccgggacgtgtacctgcagggtcccatctgggccaaaattcctcacacggacggcaactttcacccgtctcccctgatgggcggatttggactcaaacacccgcctcctcaaattctcatcaaaaacaccccggtacctgctaatcctccagaggtgtttactcctgccaagtttgcctcatttatcacgcagtacagcaccggccaggtcagcgtggagatcgagtgggaactgcagaaagaaaacagcaaacgctggaatccagagattcagtacacctcaaattatgccaagtctaataatgtggaatttgctgtcaacaacgaaggggtttatactgagcctcgccccattggcacccgttacctcacccgtaacctgtaaatggctgccgatggttatcttccagattggctcgaggacaacctctctgagggcattcgcgagtggtgggacttgaaacctggagccccgaaacccaaagccaaccagcaaaagcaggacgacggccggggtctggtgcttcctggctacaagtacctcggacccttcaacggactcgacaagggggagcccgtcaacgcggcggacgcagcggccctcgagcacgacaaggcctacgaccagcagctcaaagcgggtgacaatccgtacctgcggtataaccacgccgacgccgagtttcaggagcgtctgcaagaagatacgtcttttgggggcaacctcgggcgagcagtcttccaggccaagaagcgggttctcgaacctctcggtctggttgaggaaggcgctaagacggctcctggaaagaagagaccggtagagccatcaccccagcgttctccagactcctctacgggcatcggcaagaaaggccagcagcccgcgaaaaagagactcaactttgggcagactggcgactcagagtcagtgcccgaccctcaaccaatcggagaaccccccgcaggcccctctggtctgggatctggtacaatggctgcaggcggtggcgctccaatggcagacaataacgaaggcgccgacggagtgggtagttcctcaggaaattggcattgcgattccacatggctgggcgacagagtcatcaccaccagcacccgaacctgggccctccccacctacaacaaccacctctacaagcaaatctccaacgggacttcgggaggaagcaccaacgacaacacctacttcggctacagcaccccctgggggtattttgactttaacagattccactgccacttctcaccacgtgactggcagcgactcatcaacaacaactggggattccggcccaagagactcaacttcaagctcttcaacatccaggtcaaggaggtcacgcagaatgaaggcaccaagaccatcgccaataaccttaccagcacgattcaggtctttacggactcggaataccagctcccgtacgtcctcggctctgcgcaccagggctgcctgcctccgttcccggcggacgtcttcatgattcctcagtacgggtacctgactctgaacaatggcagtcaggccgtgggccgttcctccttctactgcctggagtactttccttctcaaatgctgagaacgggcaacaactttgagttcagctaccagtttgaggacgtgccttttcacagcagctacgcgcacagccaaagcctggaccggctgatgaaccccctcatcgaccagtacctgtactacctgtctcggactcagtccacgggaggtaccgcaggaactcagcagttgctattttctcaggccgggcctaataacatgtcggctcaggccaaaaactggctacccgggccctgctaccggcagcaacgcgtctccacgacactgtcgcaaaataacaacagcaactttgcctggaccggtgccaccaagtatcatctgaatggcagagactctctggtaaatcccggtgtcgctatggcaacccacaaggacgacgaagagcgattttttccgtccagcggagtcttaatgtttgggaaacagggagctggaaaagacaacgtggactatagcagcgttatgctaaccagtgaggaagaaattaaaaccaccaacccagtggccacagaacagtacggcgtggtggccgataacctgcaacagcaaaacgccgctcctattgtaggggccgtcaacagtcaaggagccttacctggcatggtctggcagaaccgggacgtgtacctgcagggtcctatctgggccaagattcctcacacggacggaaactttcatccctcgccgctgatgggaggctttggactgaaacacccgcctcctcagatcctgattaagaatacacctgttcccgcggatcctccaactaccttcagtcaagctaagctggcgtcgttcatcacgcagtacagcaccggacaggtcagcgtggaaattgaatgggagctgcagaaagaaaacagcaaacgctggaacccagagattcaatacacttccaactactacaaatctacaaatgtggactttgctgttaacacagatggcacttattctgagcctcgccccatcggcacccgttacctcacccgtaatctgtaa

SEQ ID NO: 757 - protein, 738 aa, unidentified; identical to SEQ ID NO: 375
  source 1..738: note = Adeno-associated virus

SEQ ID NO: 758 - DNA, 3129 bp, unidentified
  source 1..3129: mol_type = unassigned DNA; note = Adeno-associated virus
gaattcgccctttctacggctgcgtcaactggaccaatgagaactttcccttcaacgattgcgtcgacaagatggtgatctggtgggaggagggcaagatgacggccaaggtcgtggagtccgccaaggccattctcggcggcagcaaagtgcgcgtggaccaaaagtgcaagtcgtccgcccagatcgaccccacccccgtgatcgtcacctccaacaccaacatgtgcgccgtgattgacgggaacagcaccaccttcgagcaccagcagccgttgcaggaccggatgttcaagtttgaactcacccgccgtctggagcacgactttggcaaggtgacaaagcaggaagtcagagagttcttccgctgggcgcaggatcacgtgaccgaggtggcgcacgagttctacgtcagaaagggtggagccaacaagagacccgcccccgatgacgcggataaaagcgagcccaagcgggcctgcccctcagtcgcggatccatcgacgtcagacgcggaaggagctccggtggactttgccgacaggtaccaaaacaaatgttctcgtcacgcgggcatgcttcagatgctgtttccctgcaaaacatgcgagagaatgaatcagaatttcaacatttgcttcacgcacgggaccagagactgttcagaatgtttccccggcgtgtcagaatctcaaccggtcgtcagaaaaaagacgtatcggaaactctgtgcgattcatcatctgctgggggcgggcacccgagattgcttgctcggcctgcgatctggtcaacgtggacctagatgactgtgtttctgagcaataaatgacttaaaccaggtatggctgccgatggttatcttccagattggctcgaggacaacctctctgagggcattcgcgagtggtgggacttgaaacctggagccccgaaacccaaagccaaccagcaaaagcaggacgacggccggggtctggtgcttcctggctacaagtacctcggacccttcaacggactcgacaagggggagcccgtcaacgcggcggacgcagcggccctcgagcacgacaaggcctacgaccagcagctcaaagcgggtgacaatccgtacctgcggtataaccacgccgacgccgagtttcaggagcgtctgcaagaagatacgtcttttgggggcaacctcgggcgagcagtcttccaggccaagaagcgggttctcgaacctctcggtctggttgaggaaggcgctaagacggctcctggaaagaagagaccggtagagccatcaccccagcgttctccagactcctctacgggcatcggcaagaaaggccagcagcccgcgaaaaagagactcaactttgggcagactggcgactcagagtcagtgcccgaccctcaaccaatcggagaaccccccgcaggcccctctggtctgggatctggtacaatggctgcaggcggtggcgctccaatggcagacaataacgaaggcgccgacggagtgggtagttcctcaggaaattggcattgcgattccacatggctgggcgacagagtcatcaccaccagcacccgaacctgggccctccccacctacaacaaccacctctacaagcaaatctccaacgggacttcgggaggaagcaccaacgacaacacctacttcggctacagcaccccctgggggtattttgactttaacagattccactgccacttctcaccacgtgactggcagcgactcatcaacaacaactggggattccggcccaagagactcaacttcaagctcttcaacatccaggtcaaggaggtcacgcagaatgaaggcaccaagaccatcgccaataaccttaccagcacgattcaggtctttacggactcggaataccagctcccgtacgtcctcggctctgcgcaccagggctgcctgcctccgttcccggcggacgtcttcatgattcctcagtacgggtacctgactctgaacaatggcagtcaggccgtgggccgttcctccttctactgcctggagtactttccttctcaaatgctgagaacgggcaacaactttgagttcagctaccagtttgaggacgtgccttttcacagcagctacgcgcacagccaaagcctggaccggctgatgaaccccctcatcgaccagtacctgtactacctgtctcggactcagtccacgggaggtaccgcaggaactcagcagttgctattttctcaggccgggcctaataacatgtcggctcaggccaaaaactggctacccgggccctgctaccggcagcaacgcgtctccacgacactgtcgcaaaataacaacagcaactttgcctggaccggtgccaccaagtatcatctgaatggcagagactctctggtaaatcccggtgtcgctatggcaacccacaaggacgacgaagagcgattttttccgtccagcggagtcttaatgtttgggaaacagggagctggaaaagacaacgtggactatagcagcgttatgctaaccagtgaggaagaaattaaaaccaccaacccagtggccacagaacagtacggcgtggtggccgataacctgcaacagcaaaacgccgctcctattgtaggggccgtcaacagtcaaggagccttacctggcatggtctggcagaaccgggacgtgtacctgcagggtcctatctgggccaagattcctcacacggacggaaactttcatccctcgccgctgatgggaggctttggactgaaacacccgcctcctcagatcctgattaagaatacacctgttcccgcggatcctccaactaccttcagtcaagctaagctggcgtcgttcatcacgcagtacagcaccggacaggtcagcgtggaaattgaatgggagctgcagaaagaaaacagcaaacgctggaacccagagattcaatacacttccaactactacaaatctacaaatgtggactttgctgttaacacagatggcacttattctgagcctcgccccatcggcacccgttacctcacccgtaatctgtaattgcttgttaatcaataaaccggttgattcgtttcagttgaactttggtctctgcgaagggcgaattc

SEQ ID NO: 759 - protein, 738 aa, unidentified; identical to SEQ ID NO: 375
  source 1..738: note = Adeno-associated virus

SEQ ID NO: 760 - protein, 733 aa, unidentified
  source 1..733: note = Adeno-associated virus
MAADGYLPDWLEDNLSEGIREWWDLRPGAPKPKANQQKQDDGRGLVLPGYKYLGPFNGLDKGEPVNEADAAALEHDKAYDKQLEQGDNPYLKYNHADAEFQERLQEDTSFGGNLGRAVFQAKKRVLEPLGLVEEGAKTAPGKKRPIESPDSSTGIGKKGQQPAKKRLNFGQTGDSESVPDPQPIGEPPAGPSGLGSGTMAAGGGAPMADNNEGADGVGSSSGNWHCDSTWLGDRVITTSTRTWALPTYNNHLYKQISNGTSGGSTNDNTYFGYSTPWGYFDFNRFHCHFSPRDWQRLINNNWGFRPKRLNFKLFNIQVKEVTQNEGTKTIANNLTSTIQVFTDSEYQLPYVLGSAHQGCLPPFPADVFMIPQYGYLTLNNGSQAVGRSSFYCLEYFPSQMLRTGNNFEFSYQFEDVPFHSSYAHSQSLDRLMNPLIDQYLYYLSRTQSTGGTAGTQQLLFSQAGPNNMSAQAKNWLPGPCYRQQRVSTTVSQNNNSNFAWTGATKYHLNGRDSLVNPGVAMATHKGDEERFFPSSGVLMFGKQGAGKDNVDYSSVMLTSEEEIKTTNPVATEQYGVVADNLQQQNAAPIVGAVNSQGALPGMVWQNRDVYLQGPIWAKIPHTDGNFHPSPLMGGFGLKHPPPQILIKNTPVPADPPTTFSQAKLASFITQYSTGQVSVEIEWELQKENSKRWNPEIQYTSNYYKSTNVDFAVNTEGTYSEPRPIGTRYLTRNL

SEQ ID NO: 761 - DNA, 2501 bp, unidentified
  source 1..2501: mol_type = unassigned DNA; note = Adeno-associated virus
gaattcgcccttggctgcgtcaactggaccaatgagaactttcccttcaacgattgcgtcgacaagatggtgatctggtgggaggagggcaagatgacggccaaggtcgtggagtccgccaaggccattcatcatctgctggggcgggctcccgagattgcttgctcggcctgcgatctggtcaacgtggacctggatgactgtgtttctgagcaataaatgacttaaaccaggtatggctgccgatggttatcttccagattggctcgaggacaacctctctgagggcattcgcgagtggtgggacttgagacctggagccccgaaacccaaagccaaccagcaaaagcaggacgacggccggggtctggtgcttcctggctacaagtacctcggacccttcaacggactcgacaagggagagccggtcaacgaggcagacgccgcggccctcgagcacgacaaggcctacgacaagcagctcgagcagggggacaacccgtacctcaagtacaaccacgccgacgccgagtttcaggagcgtcttcaagaagatacgtcttttgggggcaacctcgggcgagcagtcttccaggccaagaagcgggttctcgaacctctcggtctggttgaggaaggcgctaagacggctcctggaaagaagagacccatagaatcccccgactcctccacgggcatcggcaagaaaggccagcagcccgctaaaaagagactcaactttgggcagactggcgactcagagtcagtgcccgaccctcaaccaatcggagaaccccccgcaggcccctctggtctgggatctggcacaatggctgcaggcggtggcgctccaatggcagacaataacgaaggcgccgacggagtgggtagttcctcaggaaattggcattgcgattccacatggctgggcgacagagtcatcaccaccagcacccgaacctgggccctccccacctacaacaaccacctctacaagcaaatctccaacgggacatcgggaggaagcaccaacgacaacacctacttcggctacagcaccccctgggggtattttgactttaacagattccactgccacttctcaccacgtgactggcagcgactcatcaacaacaactggggattccggcccaagagactcaacttcaagctcttcaacatccaggtcaaggaggtcacgcagaatgaaggcaccaagaccatcgccaataaccttaccagcacgattcaggtctttacggactcggaataccagctcccgtacgtcctcggctctgcgcaccagggctgcctgcctccgttcccggcggacgtcttcatgattcctcagtacgggtacctgactctgaacaacggcagtcaggccgtgggccgttcctccttctactgcctggagtactttccttctcaaatgctgagaacgggcaacaactttgagttcagctaccagtttgaggacgtgccttttcacagcagctatgcgcacagccaaagcctggaccggctgatgaaccccctcatcgaccagtacctgtactacctgtctcggactcagtccacgggaggtaccgcaggaactcagcagttgctattttctcaggccgggcctaataacatgtcggctcaggccaaaaactggctacccgggccctgctaccggcagcaacgcgtctccacgacagtgtcgcaaaataacaacagcaactttgcttggaccggtgccaccaagtatcatctgaatggcagagactctctggtaaatcccggtgtcgctatggcaacgcacaagggcgacgaagagcgattttttccatccagcggagtcttgatgtttgggaaacagggagctggaaaagacaacgtagactatagcagcgttatgctaaccagtgaggaagaaatcaaaaccaccaacccagtggccacagaacagtacggcgtggtggccgataacctgcaacagcaaaacgccgctcctattgtaggggccgtcaacagtcaaggagccttacctggcatggtctggcagaaccgggacgtgtacctgcagggtcctatctgggccaagattcctcacacggacggcaactttcatccttcgccgctgatgggaggctttggactgaaacacccgcctcctcagatcctgattaagaatacacctgttcccgcggatcctccaactaccttcagtcaagccaagctggcgtcgttcatcacgcagtacagcaccggacaggtcagcgtggaaattgaatgggagctgcagaaagagaacagcaagcgctggaacccagagattcagtatacttccaactactacaaatctacaaatgtggactttgctgtcaatactgagggtacttattcagagcctcgccccattggcacccgttacctcacccgtaacctgtaattgcctgttaatcaataaaccggttgattcgtttcagttgaactttggtctcaagggcgaattc

SEQ ID NO: 762 - DNA, 2187 bp, unidentified
  source 1..2187: mol_type = unassigned DNA; note = Adeno-associated virus
atggctgccgatggttatcttccagattggctcgaggacaacctctctgagggcattcgcgagtggtgggacttgaaacctggagccccgaaacccaaagccaaccagcaaaagcaggacgacggccggggtctggtgcttcctggctacaagtacctcggacccttcaacggactcgacaagggagagccggtcaacgaggcagacgccgcggccctcgagcacgacaaggcctacgacaagcagctcgagcagggggacaacccgtacctcaagtacaaccacgccgacgccgagtttcaggagcgtcttcaagaagatacgtcttttgggggcaacctcgggcgagcagtcttccaggccaagaagcgggttctcgaacctctcggtctggttgaggaaggcgctaagacggctcctggaaagaagagacccatagaatcccccgactcctccacgggcatcggcaagaaaggccagcagcccgctaaaaagaagctcaactttgggcagactggcgactcagagtcagtgcccgacccccaacctctcggagaacctcccgccgcgccctcaggtctgggatctggtacaatggctgcaggcggtggcgcaccaatggcagacaataacgaaggcgccgacggagtgggtaatgcctccggaaattggcattgcgattccacatggctgggcgacagagtcatcaccaccagcacccgcacctgggccctgcccacctacaacaaccacctctacaagcagatatcaagtcagagcggggctaccaacgacaaccacttcttcggctacagcaccccctggggctattttgacttcaacagattccactgccacttctcaccacgtgactggcagcgactcatcaacaacaactggggattccggcccagaaagctgcggttcaagttgttcaacatccaggtcaaggaggtcacgacgaacgacggcgttacgaccatcgctaataaccttaccagcacgattcaggtcttctcggactcggagtaccaactgccgtacgtcctcggctctgcgcaccagggctgcctccctccgttccctgcggacgtgttcatgattcctcagtacggatatctgactctaaacaacggcagtcagtctgtgggacgttcctccttctactgcctggagtactttccttctcagatgctgagaacgggcaataactttgaattcagctacacctttgaggaagtgcctttccacagcagctatgcgcacagccagagcctggaccggctgatgaatcccctcatcgaccagtacctgtactacctggcccggacccagagcactacggggtccacaagggagctgcagttccatcaggctgggcccaacaccatggccgagcaatcaaagaactggctgcccggaccctgttatcggcagcagagactgtcaaaaaacatagacagcaacaacaacagtaactttgcctggaccggggccactaaataccatctgaatggtagaaattcattaaccaacccgggcgtagccatggccaccaacaaggacgacgaggaccagttctttcccatcaacggagtgctggtttttggcgaaacgggggctgccaacaagacaacgctggaaaacgtgctaatgaccagcgaggaggagatcaaaaccaccaatcccgtggctacagaagaatacggtgtggtctccagcaacctgcaatcgtctacggccggaccccagacacagactgtcaacagccagggggctctgcccggcatggtctggcagaaccgggacgtgtacctgcagggtcccatctgggccaaaattcctcacacggacggcaactttcacccgtctcccctgatgggcggatttggactcaaacacccgcctcctcaaattctcatcaaaaacaccccggtacctgctaatcctccagaggtgtttactcctgccaagtttgcctcatttatcacgcagtacagcaccggccaggtcagcgtggagatcgagtgggaactgcagaaagaaaacagcaaacgctggaatccagagattcagtacacctcaaattatgccaagtctaataatgtggaatttgctgtcaacaacgaaggggtttatactgagcctcgccccattggcacccgttacctcacccgtaacctgtaa

SEQ ID NO: 763 - protein, 728 aa, unidentified; identical to SEQ ID NO: 431
  source 1..728: note = Adeno-associated virus

SEQ ID NO: 764 - protein, 728 aa, unidentified; identical to SEQ ID NO: 523
  source 1..728: note = Adeno-associated virus

SEQ ID NO: 765 - protein, 728 aa, unidentified; identical to SEQ ID NO: 523
  source 1..728: note = Adeno-associated virus

SEQ ID NO: 766 - protein, 733 aa, unidentified
  source 1..733: note = Adeno-associated virus
MAADGHLPDWLEDNLSEGIREWWDLKPGAPKPKANQQKQDDGRGLVLPGYKYLGPFNGLDKGEPVNAADAAALEHDKAYDQQLKAGDNPYLRYNHADAEFQERLQEDTSFGGNLGRAVFQAKKRVLEPLGLVEEGAKTAPGKKRPIESPDSSTGIGKKGQQPAKKKLNFGQTGDSESVPDPQPIGEPPAGPSGLGSGTMAAGGGAPMADNNEGADGVGSSSGNWHCDSTWLGDRVITTSTRTWALPTYNNHLYKQISNGTSGGSTNDNTYFGYSTPWGYFDFNRFHCHFSPRDWQRLINNSWGFRPKRLNFKLFNIQVKEVTQNEGTKTIANNLTSTIQVFTDSEYQLPYVLGSAHQGCLPPFPADVFMIPQYGYLTLNNGSQAVGRSSFYCLEYFPSQMLRTGNNFEFSYQFEDVPFHSSYAHSQSLDRLMNPLIDQYLYYLSRTQSTGGTAGTQQLLFSQAGPNNMSAQAKNWLPGPCYRQQRVSTTLSQNNNSNFAWTGATKYHLNGRDSLVNPGVAMATHKDDEERFFPSSGVLMFGKQGAGKDNVDYSSVMLTSEEEIKTTNPVATEQYGVVADNLQQQNAAPIVGAVNSQGALPGMVWQNRDVYLQGPIWAKIPHTDGNFHPSPLMGGFGLKHPPPQILIKNTPVPADPPTTFSQAKLASFITQYSTGQVSVEIEWELQKENSKRWNPEIQYTSNYYKSTNVDFAVNTEGTYSEPRPIGTRYLTRNL

SEQ ID NO: 767 - DNA, 3113 bp, unidentified
  source 1..3113: mol_type = unassigned DNA; note = Adeno-associated virus
gaattcgccctttctacggctgcgtcaactggaccaatgagaactttcccttcaacgattgcgtcgacaagatggtgatctggtgggaggagggcaagatgacggccaaggtcgtggagtccgccaaggccattctcggcggcagcaaggtgcgcgtggaccaaaagtgcaagtcgtccgcccagatcgatcccacccccgtgatcgtcacttccaacaccaacatgtgcgccgtgattgacgggaacagcaccaccttcgagcaccagcagccgttacaagaccggatgttcaaatttgaactcacccgccgtctggagcatgactttggcaaggtgacaaagcaggaagtcaaagagttcttccgctgggcgcaggatcacgtgaccgaggtggcgcatgagttctacgtcagaaagggtggagccaacaagagacccgcccccgatgacgcggataaaagcgagcccaagcgggcctgcccctcagtcgcggatccatcgacgtcagacgcggaaggagctccggtggactttgccgacaggtaccaaaacaaatgttctcgtcacgcgggcatgcttcagatgctgcttccctgcaagacatgcgagagaatgaatcagaatttcagcatttgcttcacgcacgggaccagagactgttcagaatgtttccccggcgtgtcagaatctcaaccggtcgtcagaaagaggacgtatcggaaactctgtgccattcatcatctgctggggcgggctcccgagattgcttgctcggcctgcgatctggtcaacgtggacctggatgactgtgtttctgagcaataaatgacttaaaccaggtatggctgccgatggtcatcttccagattggctcgaggacaacctctctgagggcattcgcgagtggtgggacttgaaacctggagccccgaaacccaaagccaaccagcaaaagcaggacgacggccggggtctggtgcttcctggctacaagtacctcggacccttcaacggactcgacaagggggagcccgtcaacgcggcggacgcagcggccctcgagcacgacaaggcctacgaccagcagctcaaagcgggtgacaatccgtacctgcggtataaccacgccgacgccgagtttcaggagcgtcttcaagaagatacgtcttttgggggcaacctcgggcgagcagtcttccaggccaagaagcgggttctcgaacctctcggtctggttgaggaaggcgctaagacggctcctggaaagaagagacccatagaatcccccgactcctccacgggcatcggcaagaaaggccagcagcccgctaaaaagaagctcaactttgggcagactggcgactcagagtcagtgcccgaccctcaaccaatcggagaaccccccgcaggcccctctggtctgggatctggtacaatggctgcaggcggtggcgctccaatggcagacaataacgaaggcgccgacggagtgggtagttcctcaggaaattggcattgcgattccacatagctgggcgacagagtcatcaccaccagcacccgaacctgggccctccccacctacaacaaccacctctacaagcaaatctccaacgggacatcgggaggaagcaccaacgacaacacctacttcggctacagcaccccctgggggtattttgactttaacagattccactgccacttctcaccacgtgactggcagcgactcatcaacaacagctggggattccggcccaagagactcaacttcaagctcttcaacatccaggtcaaggaggtcacgcagaatgaaggcaccaagaccatcgccaataaccttaccagcacgattcaggtctttacggactcggaataccagctcccgtacgtcctcggctctgcgcaccagggctgcctgcctccgttcccggcggacgtcttcatgattcctcagtacgggtacctgactctgaacaacggcagtcaggccgtgggccgttcctccttctactgcctggagtactttccttctcaaatgctgagaacgggcaacaactttgagttcagctaccagtttgaggacgtgccttttcacagcagctacgcgcacagccaaagcctggaccggctgatgaaccccctcatcgaccagtacctgtactacctgtctcggactcagtccacgggaggtaccgcaggaactcagcagttgctattttctcaggccgggcctaataacatgtcggctcaggccaaaaactggctacccgggccctgctaccggcagcaacgcgtctccacgacactgtcgcaaaataacaacagcaactttgcttggaccggtgccaccaagtatcatctgaatggcagagactctctggtaaatcccggtgtcgctatggcaacgcacaaggacgacgaagagcgattttttccatccagcggagtcttgatgtttgggaaacagggagctggaaaagacaacgtggactatagcagcgttatgctaaccagtgaggaagaaatcaaaaccaccaacccagtggccacagaacagtacggcgtggtggccgataacctgcaacagcaaaacgccgctcctattgtaggggccgtcaacagtcaaggagccttacctggcatggtctggcagaaccgggacgtgtacctgcagggtcctatctgggccaagattcctcacacggacggcaactttcatccttcgccgctgatgggaggctttggactgaaacacccgcctcctcagatcctgattaagaatacacctgttcccgcggatcctccaactaccttcagtcaagccaagctggcgtcgttcatcacgcagtacagcaccggacaggtcagcgtggaaattgaatgggagctgcagaaagagaacagcaagcgctggaacccagagattcagtatacttccaactactacaaatctacaaatgtggactttgctgtcaatactgagggtacttattcagagcctcgccccattggcacccgttacctcacccgtaacctgtaattgcctgttaatcaataaaccggttaattcgtttcagttgaactttggtctctgcgaagggcgaattc

SEQ ID NO: 768 - protein, 731 aa, unidentified
  source 1..731: note = Adeno-associated virus
MAADGYLPDWLEDNLSEGIREWWDLKPGAPKPKANQQKQDDGRGLVLPGYKYLGPFNGLDKGEPVNEADAAALEHDKAYDKQLEQGDNPYLKYNHADAEFQERLQEDTSFGGNLGRAVFRAKKRVLEPLGLVEEGAKTAPGKKRPIESPDSSTGIGKKGQQPAKKKLNFGQTGDSESVPDPQPLGEPPAAPSGLGSGTMAAGGGAPMADNNEGADGVGNASGNWHCDSTWLGDRVITTSTRTWALPTYNNHLYKQISSQSGATNDNHFFGYSTPWGYFDFNRFHCHFSPRDWQRLINNNRGFRPRKLRFKLFNIQVKEVTTNDGVTTIANNLTSTIQVFSDSEYQLPYVLGSAHQGCLPPFPADVFMIPQYGYLTLNNGSQSVGRSSFYCLEYFPSQMLRTGNNFEFSYQFEDVPFHSSYAHSQSLDRLMNPLIDQYLYYLSRTQSTGGTAGTQQLLFSQAGPNNMSAQAKNWLPGPCYRQQRVSTTLSQNNNSNFAWTGATKYHLNGRDSLVNPGVAMATHKDDEERFFPSSGVLMFGKQGAGKDNVDYSSVMLTSEEEIKTTNPVATEQYGVVADNLQQQNAAPIVGAVNSQGALPGMAWQNRDVYLQGPIWAKIPHTDGNFHPSPLMGGFGLKHPPPQILIKNTPVPADPPTTFSQAKLASFITQYSTGQVSVEIEWELQKENSKRWNPEIQYTSNYYKSTNVDFAVNTEGTYSEPRPIGTRYLTRNL

SEQ ID NO: 769 - DNA, 3106 bp, unidentified
  source 1..3106: mol_type = unassigned DNA; note = Adeno-associated virus
gaattcgcccttctacggctgcgtcaactggaccaatgagaactttcccttcaacgattgcgtcgacaagatggtgatctggtgggaggagggcaagatgacggccaaggtcgtggagtccgccaaggccattctcggcggcagcaaggtgcgcgtggaccaaaagtgcaagtcgtccgcccagatcgaccccacccccgtgatcgtcacctccaacaccaacatgtgcgccgtgattgacgggaacagcaccaccttcgagcaccagcagccgttgcaggaccggatgttcaaatttgaactcacccgccgtctggagcatgactttggcaaggcgacaaagcaggaagtcaaagagttcttccgctgggcgcaggatcacgtgaccgaggtggcgcatgagttctacgtcagaaagggtggagccaacaagagacccgcccccgatgacgcggataaaagcgagcccaagcgggcccgcccctcagtcgcggatccatcgacgtcagacgcggaaggagctccggtggactttgccgacaggtaccaaaacaaatgttctcgtcacgcgggcatgcttcagatgctgtttccctgcaaaacatgcgagagaatgaatcagaatttcaacatttgcttcacgcacgggaccagagactgttcagaatgtttccccggcgtgtcagaatctcaaccggtcgtcagaaagaggacgtatcggaaactctgtgccattcatcatctgctggggcgggctcccgagattgcttgctcggcctgcgatctggtcaacgtggacctggatgactgtgtttctgagcaataaatgacttaaaccaggtatggctgccgatggttatcttccagattggctcgaggacaacctctctgagggcattcgcgagtggtgggacttgaaacctggagccccgaaacccaaagccaaccagcaaaagcaggacgacggccggggtctggtgcttcctggctacaagtacctcggacccttcaacggactcgacaagggagagccggtcaacgaggcagacgccgcggccctcgagcacgacaaggcctacgacaagcagctcgagcagggggacaacccgtacctcaagtacaaccacgccgacgccgagtttcaggagcgtcttcaagaagatacgtcttttgggggcaacctcgggcgagcagtcttccgggccaagaagcgggttctcgaacctctcggtctggttgaggaaggcgctaagacggctcctggaaagaagagacccatagaatcccccgactcctccacgggcatcggcaagaaaggccagcagcccgctaaaaagaagctcaactttgggcagactggcgactcagagtcagtgcccgacccccaacctctcggagaacctcccgccgcgccctcaggtctgggatctggtacaatggctgcaggcggtggcgcaccaatggcagacaataacgaaggcgccgacggagtgggtaatgcctccggaaattggcattgcgattccacatggctgggcgacagagtcatcaccaccagcacccgcacctgggccctgcccacctacaacaaccacctctacaagcagatatcaagtcagagcggggctaccaacgacaaccacttcttcggctacagcaccccctggggctattttgacttcaacagattccactgccacttctcaccacgtgactggcagcgactcatcaacaacaaccggggattccggcccagaaagctgcggttcaagttgttcaacatccaggtcaaggaggtcacgacgaacgacggcgttacgaccatcgctaataaccttaccagcacgattcaggtcttctcggactcggagtaccaactgccgtacgtcctcggctctgcgcaccagggctgcctccctccgttccctgcggacgtgttcatgattcctcagtacggatatctgactctaaacaacggcagtcagtctgtgggacgttcctccttctactgcctggagtactttccttctcagatgctgagaacgggcaataactttgaattcagctaccagtttgaggacgtgccctttcacagcagctacgcgcacagccaaagcctggaccggctgatgaaccccctcatcgaccagtacctgtactacctgtctcggactcagtccacgggaggtaccgcaggaactcagcagttgctattttctcaggccgggcctaataacatgtcggctcaggccaaaaactggctacccgggccctgctaccggcagcaacgcgtctccacgacactgtcgcaaaataacaacagcaactttgcttggaccggtgccaccaagtatcatctgaatggcagagactctctggtaaatcccggtgtcgctatggcaacgcacaaggacgacgaagagcgattttttccatccagcggagtcttgatgtttgggaaacagggagctggaaaagacaacgtggactatagcagcgttatgctaaccagtgaggaagaaatcaaaaccaccaacccagtggccacagaacagtacggcgtggtggccgataacctgcaacagcaaaacgccgctcctattgtaggggccgtcaacagtcaaggagccttacctggcatggcctggcagaaccgggacgtgtacctgcagggtcctatctgggccaagattcctcacacggacggcaactttcatccttcgccgctgatgggaggctttggactgaaacacccgcctcctcagatcctgattaagaatacacctgttcccgcggatcctccaactaccttcagtcaagccaagctggcgtcgttcatcacgcagtacagcaccggacaggtcagcgtggaaattgaatgggagctgcagaaagagaacagcaagcgctggaacccagagattcagtatacttccaactactacaaatctacaaatgtggactttgctgtcaatactgagggtacttattcagagcctcgccccattggcacccgttacctcacccgtaacctgtaattgcctgttaatcaataaaccggttaattcgtttcagttgaactttggtctctgcgaagggcgaattc

SEQ ID NO: 770 - protein, 738 aa, unidentified
  source 1..738: note = Adeno-associated virus
MAADGYLPDWLEDNLSEGIREWWDLKPGAPKPKANQQKQDDGRGLVLPGYKYLGPFNGLDKGEPVNEADAAALEHDKAYDKQLEQGDNPYLKYNHADAEFQERLQEDTSFGGNLGRAVFQAKKRVLEPLGLVEEGAKTAPGKKRPVEPSPQRSPDSSTGIGKTGQQPAKKRLNFGQTGDSESVPDPQPIGEPPAGPSGLGSGTMAAGGGAPMADNNEGADGVGSSSGNWHCDSTWLGDRVITTSTRTWALPTYNNHLYKQISNGTSGGSTNDNTYFGYSTPWGYFDFNRFHCHFSPRDWQRLINNNWGFRPKRLNFKLFNIQVKEVTQNEGTKTIANNLTSTIQVFTDSEYQLPYVLGSAHQGCLPPFPADVFMIPQYGYLTLNNGSQAVGRSSFYCLEYFPSQMLRTGNNFEFSYQFEDVPFHSSYAHSQSLDRLMNPLIDQYLYYLSRTQSTGGTAGTQQLLFSQAGPNNMSAQAKNWLPGPCYRQQRVSTTLSQNNNSNFAWTGATKYHLNGRDSLVNPGVAMATHKDDEERFFPSSGVLMFGKQGAGKDNVDYSSVMLTSEEEIKTTNPVATEQYGVVADNLQQQNAAPIVGAVNSQGALPGMVWQNRDVYLQGPIWAKIPHTDGNFHPSPLMGGFGLKHPPPQILIKNTPVPADPPTTFSQAKLASFITQYSTGQVSVEIEWELQKENSKRWNPEIQYTSNYYKSTNVDFAVNTEGTYSEPRPIGTRYLTRNL

SEQ ID NO: 771 - DNA, 3197 bp, unidentified
  source 1..3197: mol_type = unassigned DNA; note = Adeno-associated virus
gaattcgccctttctacggctgcgtcaactggaccaatgagaactttcccttcaacgattgcgtcgacaagatggtgatctggtgggaggagggcaagatgacggccaaggtcgtggagtccgccaaggccattctcggcggcagcaaggtgcgcgtggaccaaaagtgcaagtcgtccgcccagatcgaccccacccccgtgatcgtcacctccaacaccaacatgtgcgccgtgattgacgggaacagcaccaccttcgagcaccagcagccgttacaagaccggatgttcaaatttgaactcacccgccgtctggagcacgactttggcaaggtgacaaagcaggaagtcaaagagttcttccgctgggcgcaggatcacgtgaccgaggtggcgcatgagttctacgtcagaaagggtggagccaacaagagacccgcccccgatgacgcggataaaagcgagcccaagcgggcctgcccctcagtcgcggatccatcgacgtcagacgcggaaggagctccggtggactttgccgacaggtaccaaaacaaatgttctcgtcacgcgggcatgcttcagatgctgtttccctgcaagacatgcgagagaatgaatcagaatttcaacatttgcttcacgcacgggaccagagactgttcagaatgtttccccggcgtgtcagaatctcaaccggtcgtcagaaagaggacgtatcggaaactctgtgccattcatcatctgctggggcgggctcccgagattgcttgctcggcctgcgatctggtcaacgtggacctggatgactgtgtttctgagcaataaatgacttaaaccaggtatggctgccgatggttatcttccagattggctcgaggacaacctctctgagggcattcgcgagtggtgggacttgaaacctggagccccgaaacccaaagccaaccagcaaaagcaggacgacggccggggtctggtgcttcctggctacaagtacctcggacccttcaacggactcgacaagggagagccggtcaacgaggcagacgccgcggccctcgagcacgacaaggcctacgacaagcagctcgagcagggggacaacccgtacctcaagtacaaccacgccgacgccgagtttcaggagcgtcttcaagaagatacgtcttttgggggcaacctcgggcgagcagtcttccaggccaagaagcgggttctcgaacctctcggtctggttgaggaaggcgctaagacggctcctggaaagaagagaccggtagagccatcaccccagcgttctccagactcctctacgggcatcggcaagacaggccagcagcccgcgaaaaagagactcaactttgggcagactggcgactcagagtcagtgcccgaccctcaaccaatcggagaaccccccgcaggcccctctggtctgggatctggtacaatggctgcaggcggtggcgctccaatggcagacaataacgaaggcgccgacggagtgggtagttcctcaggaaattggcattgcgattccacatggctgggcgacagagtcatcaccaccagcacccgaacctgggccctccccacctacaacaaccacctctacaagcaaatctccaacgggacatcgggaggaagcaccaacgacaacacctacttcggctacagcaccccctgggggtattttgactttaacagattccactgccacttctcaccacgtgactggcagcgactcatcaacaacaactggggattccggcccaagagactcaacttcaagctcttcaacatccaggtcaaggaggtcacgcagaatgaaggcaccaagaccatcgccaataaccttaccagcacgattcaggtctttacggactcggaataccagctcccgtacgtcctcggctctgcgcaccagggctgcctgcctccgttcccggcggacgtcttcatgattcctcagtacgggtacctgactctgaacaacggcagtcaggccgtgggccgttcctccttctactgcctggagtactttccttctcaaatgctgagaacgggcaacaactttgagttcagctaccagtttgaggacgtgccttttcacagcagctacgcgcacagccaaagcctggaccggctgatgaaccccctcatcgaccagtacctgtactacctgtctcggactcagtccacgggaggtaccgcaggaactcagcagttgctattttctcaggccgggcctaataacatgtcggctcaggccaaaaactggctacccgggccctgctaccggcagcaacgcgtctccacgacactgtcgcaaaataacaacagcaactttgcttggaccggtgccaccaagtatcatctgaatggcagagactctctggtaaatcccggtgtcgctatggcaacgcacaaggacgacgaagagcgattttttccatccagcggagtcttgatgtttgggaaacagggagctggaaaagacaacgtggactatagcagcgttatgctaaccagtgaggaagaaatcaaaaccaccaacccagtggccacagaacagtacggcgtggtggccgataacctgcaacagcaaaacgccgctcctattgtaggggccgtcaacagtcaaggagccttacctggcatggtctggcagaaccgggacgtgtacctgcagggtcctatctgggccaagattcctcacacggacggcaactttcatccttcgccgctgatgggaggctttggactgaaacacccgcctcctcagatcctgattaagaatacacctgttcccgcggatcctccaactaccttcagtcaagccaagctggcgtcgttcatcacgcagtacagcaccggacaggtcagcgtggaaattgaatgggagctgcagaaagagaacagcaagcgctggaacccagagattcagtatacttccaactactacaaatctacaaatgtggactttgctgtcaatactgagggtacttattcagagcctcgccccattggcacccgttacctcacccgtaacctgtaattgcctgttaatcaataaaccggttaattcgtttcagttgaactttggtctctgcgaagggcgaattcgtttaaacctgcaggactagtccctttagtgagggttaattctgagcttggcgtaatcatgggtcatag

SEQ ID NO: 772 - protein, 735 aa, unidentified
  source 1..735: note = Adeno-associated virus
MAADGYLPDWLEDNLSEGIREWWDLKPGAPKPKANQQKQDDGRGLVLPGYKYLGPFNGLDKGEPVNEADAAALEHDKAYDKQLEQGDNPYLKYNHADAEFQERLQEDTSFGGNLGRAVFQAKKRVLEPLGLVEEGAKTAPGKKRPVEPSPQRSPDSSTGIGKTGQQPAKKRLNFGQTGDSESVPDPQPIGEPPAGPSGLGSGTMAAGGGAPMADNNEGADGVGSSSGNWHCDSTWLGDRVITTSTRTWALPTYNNHLYKQISNGTSGGSTNDNTYFGYSTPWGYFDFNRFHCHFSPRDWQRLINNNWGFRPRKLRFKLFNIQVKEVTTDDGVTTIANNLTSTIQVFSDSEYQLPYVLGSAHQGCLPPFPADVFMIPQYGYLTLNNGSQSVGRSSFYCLEYFPSQMLRTGNNFEFSYTFEEVPFHSSYAHSQSLDRLMNPLIDQYLYYLARTQSTTGSTRELQFHQAGPNTMAEQSKNWLPGPCYRQQRLSKNIDSNNNSNFAWTGATKYHLNGRNSLTNPGVAMATNKDDEDQFFPINGVLVFGKTGAANKTTLENVLMTSEEEIKTTNPVATEEYGVVSSNLQSSTAGPQTQTVNSQGALPGMVWQNRDVYLQGPIWAKIPHTDGNFHPSPLMDGFGLKHPPPQILIKNTPVPANPPEVFTPAKFASFITQYSTGQVSVEIEWELQKENSKRWNPEIQYTSNYAKSNNVEFAVNNEGVYTEPRPIGTRYLTRNL

SEQ ID NO: 773 - DNA, 3276 bp, unidentified
  source 1..3276: mol_type = unassigned DNA; note = Adeno-associated virus
gaattcgcccttcgcagagaccaaagttcaactgaaacgaattaaccggtttattgattaacaggcaattacaggttacgggtgaggtaacgggtgccaatggggcgaggctcagtataaaccccttcgttgttgacagcaaattccacattattagacttggcataatttgaggtgtactgaatctctggattccagcgtttgctgttttctttctgcagttcccactcgatctccacgctgacctggccggtgctgtactgcgtgataaatgaggcaaacttggcaggagtaaacacctctggaggattagcaggtaccggggtgtttttgatgagaatttgaggaggcgggtgtttgagtccaaatccgtccatcaggggagacgggtgaaagttgccgtccgtgtgaggaattttggcccagatgggaccctgcaggtacacgtcccggttctgccagaccatgccgggcagagccccctggctgttgacagtctgtgtctggggtccggccgtagacgattgcaggttgctggagaccacaccgtattcttctgtagccacgggattggtggttttgatctcctcctcgctggtcattagcacgttttccagcgttgtcttgttggcagcccccgttttgccaaaaaccagcactccgttgatgggaaagaactggtcctcgtcgtccttgttggtggccatggctacgcccgggttggttaatgaatttctaccattcagatggtatttagtggccccggtccaggcaaagttactgttgttgttgctgtctatgttttttgacagtctctgctgccgataacagggtccgggcagccagttctttgattgctcggccatggtgttgggcccagcctgatggaactgcagctcccttgtggaccccgtagtgctctgggtccgggccaggtagtacaggtactggtcgatgaggggattcatcagccggtccaggctctggctatgcgcatagctgctgtggaaaggcacttcctcaaaggtgtagctgaattcaaagttattgcccgttctcagcatctgagaaggaaagtactccaggcagtagaaggaggaacgtcccacagactgactgccgttgtttagagtcagatatccgtactgaggaatcatgaacacgtccgcagggaacggagggaggcagccctggtgcgcagagccgaggacgtacggcagttggtactccgagtccgagaagacctgaatcgtgctggtaaggttattagcgatggtcgtaacgccgtcgtccgtcgtgacctccttgacctggatgttgaacaacttgaaccgcagctttctgggccggaatccccagttgttgttgatgagtcgctgccagtcacgtggtgagaagtggcagtggaatctgttaaagtcaaaatacccccagggggtgctgtagccgaagtaggtgttgtcgttggtgcttcctcccgatgtcccgttggagatttgcttgtagaggtggttgttgtaggtggggagggcccaggttcgggtgctggtggtgatgactctgtcgcccagccatgtggaatcgcaatgccaatttcctgaggaactacccactccgtcggcgccttcgttattgtctgccattggagcgccaccgcctgcagccattgtaccagatcccagaccagaggggcctgcggggggttctccgattggttgagggtcgggcactgactctgagtcgccagtctgcccaaagttgagtctctttttcgcgggctgctggcctgtcttgccgatgcccgtagaggagtctggagaacgctggggtgatggctctaccggtctcttctttccaggagccgtcttagcgccttcctcaaccagaccgagaggttcgagaacccgcttcttggcctggaagactgctcgcccgaggttgcccccaaaagacgtatcttcttgaagacgctcctgaaactcggcgtcggcgtggttgtacttgaggtacgggttgtccccctgctcgagctgcttgtcgtaggccttgtcgtgctcgagggccgcggcgtctgcctcgttgaccggctctcccttgtcgagtccgttgaagggtccgaggtacttgtagccaggaagcaccagaccccggccgtcgtcctgcttttgctggttggctttgggtttcggggctccaggtttcaagtcccaccactcgcgaatgccctcagagaggttgtcctcgagccaatctggaagataaccatcggcagccatacctggtttaagtcatttattgctcagaaacacagtcatccaggtccacgttgaccagatcgcaggccgagcaagcaatctcgggagcccgccccagcagatgatgaatggcacagagtttccgatacgtcctctttctgacgaccggttgagattctgacacgccggggaaacattctgaacagtctctggtcccgtgcgtgaagcaaatgttgaaattctgattcattctctcgcatgtcttgcagggaaacagcatctgaagcatgcccgcgtgacgagaacacttgttttggtacctgtcggcaaagtccaccggagctccttccgcgtctgacgtcgatggatgcaaaatgtcgcaaaagcactcacgtgacagctaatacaggaccactcccctatgacgtgatttacgtcagcgctatgcccgcgtgacgagaacatttgttttggtacctgtcggcaaagtccaccggagctccttccgcgtctgacgtcgatggatccgcgactgaggggcaggcccgcttgggctcgcttttatccgcgtcatcgggggcgggtctcttgttggctccaccctttctgacgtagaactcatgcgccacctcggtcacgtgatcctgcgcccagcggaagaactctttgacttcctgctttgtcaccttgccaaagtcatgctccagacggcgggtgagttcaaatttgaacatccggtcctgcaacggctgctggtgctcgaaggtggtgctgttcccgtcaatcacggcgcacatgttggtgttggaagtgacgatcacgggggtgggatcgatctgggcggaagacttgcacttttggtccacgcgcaccttgctgccgccgagaatggccttggcggactccacgaccttggccgtcatcttgccctcctcccaccagatcaccatcttgtcgacgcaatcgttgaagggaaagttctcattggtccagttgacgcagccgtagaaagggcgaattc

SEQ ID NO: 774 - protein, 738 aa, unidentified; identical to SEQ ID NO: 439
  source 1..738: note = Adeno-associated virus

SEQ ID NO: 775 - protein, 738 aa, unidentified
  source 1..738: note = Adeno-associated virus
MAADGYLPDWLEDNLSEGIREWWDLKPGAPKPKANQQKQDDGRGLVLPGYKYLGPFNGLDKGEPVNAADAAALEHDKAYDQQLKAGDNPYLRYNHADAEFQERLQEDTSFGGNLGRAVFQAKKRVLEPLGLVEEGAKTAPGKKRPVEPSPQRSPDSSTGIGKKGHQPARKRLNFGQTGDSESVPDPQPIGEPPAGPSGLGSGTMAAGGGAPMADNNEGADGVGSSSGNWHCDSTWLGDRVITTSTRTWALPTYNNHLYKQISNGTSGGSTNDNTYFGYSTPWGYFDFNRFHCHFSPRDWQRLINNNWGFRPKRLNFKLFNIQVKEVTQNEGTKTIANNLTSTIQVFTDSEYQLPYVPGSAHQGCLPPFPADVFMIPQYGYLTLNNGSQAVGRSSFYCLEYFPSQMLRTGNNFEFSYTFEDVPFHSSYAHSQSLDRLMNPLIDQYLYYLSRTQSTGGTQGTQQLLFSQAGPANMSAQAKNWLPGPCYRQQRVSTTLSQNNNSNFAWTGATKYHLNGRDSLVNPGVAMATHKDDEERFFPSSGVLMFGKQGAGKDNVDYSSVMLTSEEEIKTTNPVATEQYGVVADNLQQTNGAPIVGTVNSQGALPGMVWQNRDVYLQGPIWAKIPHTDGNFHPSPLMGGFGLKHPPPQILIKNTPVPADPPTTFSQAKLASFITQYSTGQVSVEIEWELQKENSKRWNPEIQYTSNYYKSTNVDFAVNTEGTYSEPRPIGTRYLTRNL

SEQ ID NO: 776 - protein, 738 aa, unidentified; identical to SEQ ID NO: 437
  source 1..738: note = Adeno-associated virus

SEQ ID NO: 777 - protein, 728 aa, unidentified
  source 1..728: note = Adeno-associated virus
MAADGYLPDWLEDNLSEGIREWWDLKPGAPKPKANQQKQDDGRGLVLPGYKYLGPFNGLDKGEPVNEADAAALEHDKAYDKQLEQGDNPYLKYNHADAEFQERLQEDTSFGGNLGRAVFQAKKRVLEPLGLVEEGAKTAPGKKRPIESPDSSTGIGRKGQQPAKKKLNFGQTGDSESVPDPQPIGEPPAGPSGLGSGTMAAGGGAPMADNNEGADGVGNASGNWHCDSTWLGDRVITTSTRTWALPTYNNHLYKQISSQSGATNDNHFFGYSTPWGYFDFNRFHCHFSPRDWQRLINNNWGFRPRKLRFKLFNIQVKEVTTNDGVTTIANNLTSTIQVFSDSEYQLPYVLGSAHQGCLPPFPADVFMIPQYGYLTLNNGSQSVGRSSFYCLEYFPSQMLRTGNNFEFSYTFEEVPFHSSYAHSQSLDRLMNPLIDQYLYYLARTQSTTGSTRELQFHQAGPNTMAEQSKNWLPGPCYRQQRLSKNIDSNNNSNFAWTGATKYHLNGRNSLTNPGVAMATNKDDEDQFFPINGVLVFGKTGAANKTTLENVLMTSEEEIKTTNPVATEEYGVVSSNLQSSTAGPQTQTVNSQGALPGMVWQNRDVYLQGPIWAKIPHTDGNFHPSPLMGGFGLKHPPPQILIKNTPVPANPPEVFTPAKFASFITQYSTGQVSVEIEWELQKENSKRWNPEIQYTSNYAKSNNVEFAVNNEGVYTEPRPIGTRYLTRNL

SEQ ID NO: 778 - DNA, 2489 bp, unidentified
  source 1..2489: mol_type = unassigned DNA; note = Adeno-associated virus
gaattcgccctttctacggctgcgtcaactggaccaatgagaactttcccttcaacgattgcgtcgacaagatggtgatctggtgggaggagggcaagatgacggccaaggtcgtgaagtccgccaaggccattcatcatctgctggggcgggctcccgagattgcttgctcggcctgcgatctggtcaacgtggacctggatgactgtgtttctgagcaataaatgacttaaaccaggtatggctgccgatggttatcttccagattggctcgaggacaacctctctgagggcattcgcgagtggtgggacttgaaacctggagccccgaaacccaaagccaaccagcaaaagcaggacgacggccggggtctggtgcttcctggctacaagtacctcggacccttcaacggactcgacaagggagagccggtcaacgaggcagacgccgcggccctcgagcacgacaaggcctacgacaagcagctcgagcagggggacaacccgtacctcaagtacaaccacgccgacgccgagtttcaggagcgtcttcaagaagatacgtcttttgggggcaacctcgggcgagcagtcttccaggccaagaagcgggttctcgaacctctcggtctggttgaggaaggcgctaagacggctcctggaaagaagagacccatagaatcccccgactcctccacgggcatcggcaggaaaggccagcagcccgctaaaaagaagctcaactttgggcagactggcgactcagagtcagtgcccgaccctcaaccaatcggagaaccccccgcaggcccctctggtctgggatctggtacaatggctgcaggcggtggcgctccaatggcagacaataacgaaggcgccgacggagtgggtaatgcctccggaaattggcattgcgattccacatggctgggcgacagagtcatcaccaccagcacccgcacctgggccctgcccacctacaacaaccacctctacaagcagatatcaagtcagagcggggctaccaacgacaaccacttcttcggctacagcaccccctggggctattttgacttcaacagattccactgccacttctcaccacgtgactggcagcgactcatcaacaacaactggggattccggcccagaaagctgcggttcaagttgttcaacatccaggtcaaggaggtcacgacgaacgacggcgttacgaccatcgccaataaccttaccagcacgattcaggtcttctcggactcggagtaccaactgccgtacgtcctcggctctgcgcaccagggctgcctccctccgttccctgcggacgtgttcatgattcctcagtacggatatctgactctaaacaacggcagtcagtctgtgggacgttcctccttctactgcctggagtactttccttctcagatgctgagaacgggcaataactttgaattcagctacacctttgaggaagtgcctttccacagcagctatgcgcacagccagagcctggaccggctgatgaatcccctcatcgaccagtacctgtactacctggcccggacccagagcactacggggtccacaagggagctgcagttccatcaggctgggcccaacaccatggccgagcaatcaaagaactggctgcccggaccctgttatcggcagcagagactgtcaaaaaacatagacagcaacaacaacagtaactttgcctggaccggggccactaaataccatctgaatggtagaaattcattaaccaacccgggcgtagccatggccaccaacaaggacgacgaggaccagttctttcccatcaacggagtgctggtttttggcaaaacgggggctgccaacaagacaacgctggaaaacgtgctaatgaccagcgaggaggagatcaaaaccaccaatcccgtggctacagaagaatacggtgtggtctccagcaacctgcaatcgtctacggccggaccccagacacagactgtcaacagccagggggctctgcccggcatggtctggcagaaccgggacgtgtacctgcagggtcccatctgggccaaaattcctcacacggacggcaactttcacccgtctcccctgatgggcggatttggactcaaacacccgcctcctcaaattctcatcaaaaacaccccggtacctgctaatcctccagaggtgtttactcctgccaagtttgcctcatttatcacgcagtacagcaccggccaggtcagcgtggagatcgagtgggaactgcagaaagaaaacagcaaacgctggaatccagagattcagtacacctcaaattatgccaagtctaataatgtggaatttgctgtcaacaacgaaggggtttatactgagcctcgccccattggcacccgttacctcacccgtaacctgtaattgcctgttaatcaataaaccggttaattcgtttcagttgaactttggtcaagggcgaattc

SEQ ID NO: 779 - protein, 728 aa, unidentified
  source 1..728: note = Adeno-associated virus
MAADGYLPDWLEDNLSEGIREWWDLKPGAPKPKANQQKQDDGRGLVLPGYKYLGPFNGLDKGEPVNAADAAALEHDKAYDQQLKAGDNPYLRYNHADAEFQERLQEDTSFGGNLGRAVFQAKKRVLEPLGLVEEGAKTAPGKKRPIESPDSSTGIGKKGQQPAKKKLNFGQTGDSESVPDPQPIGEPPAGPSGLGSGTMAAGGGAPMADNNEGADGVGNASGNWHCDSTWLGDRVITTSTRTWALPTYNNHLYKQISSQSGATNDNHFFGYSTPWGYFDFNRFHCHFSPRDWQRLINNNWGFRPRKLRFKLFNIQVKEVTTNDGVTTIANNLTSTIQVFSDSEYQLPYVLGSAHQGCLPPFPADVFMIPQYGYLTLNNGSQSVGRSSFYCLEYFPSQMLRTGNNFEFSYTFEEVPFHSSYAHSQSLDRLMNPLIDQYLYYLARTQSTTGSTRELQFHQAGPNTMAEQSKNWLPGPCYRRQRLSKDIDSNNNSNFAWTGATKYHLNGRNSLTNPGVAMATNKDDEDQFFPINGVLVFGKTGAANKTTLENVLMTSEEEIKTTNPVATEEYGVVSSNLQSSTAGPQTQTVNSQGALPGMVWQNRDVYLQGPIWAKIPHTDGNFHPSPLMGGFGLKHPPPQILIKNTPVPANPPEVFTPAKFASFITQYSTGQVSVEIEWELQKENSKRWNPEIQYTSNYAKSNNVEFAVNNEGVYTEPRPIGTRYLTRNL

SEQ ID NO: 780 - DNA, 3098 bp, unidentified
  source 1..3098: mol_type = unassigned DNA; note = Adeno-associated virus
gaattcgccctttctacggctgcgtcaactggaccaatgagaactttcccttcaacgattgcgtcgacaagatggtgatctggtgggaggagggcaagatgacggccaaggtcgtggagtccgccaaggccattctcggcggcagcaaggtgcgcgtggaccaaaagtgcaagtcttccgcccagatcgatcccacccccgtgatcgtcacttccaacaccaacatgtgcgccgtgattgacgggaacagcaccaccttcgagcaccagcagccgttacaagaccggatgttcaaatttgaactcacccgccgtctggagcacgactttggcaaggtgacaaagcaggaagtcaaagagttcttccgctgggcgcaggatcacgtgaccgaggtggcgcatgagttctacgtcagaaagggtggagccaacaagagacccgcccccgatgacgcggataaaagcgagcccaagcgggcctgcccctcagtcgcggatccatcgacgtcagacgcggaaggagctccggtggactttgccgacaggtaccaaaacaaatgttctcgtcacgcgggcatgcttcagatgctgtttccctgcaagacatgcgagagaatgaatcagaatttcaacatttgcttcacgcacgggaccggagactgttcagaatgtttccccggcgtgtcagaatctcaaccggtcgtcagaaagaggacgtatcggaaactctgtgccattcatcatctgctggggcgggctcccgagattgcttgctcggcctgcgatctggtcaacgtggacctggatgactgtgtttctgagcaataaatgacttaaaccaggtatggctgccgatggttatcttccagattggctcgaggacaacctctctgagggcattcgcgagtggtgggacttgaaacctggagccccgaaacccaaagccaaccagcaaaagcaggacgacggccggggtctggtgcttcctggctacaagtacctcggacccttcaacggactcgacaagggagagccggtcaacgcggcggacgcagcggccctcgagcacgacaaggcctacgaccagcagctcaaagcgggtgacaatccgtacctgcggtataaccacgccgacgccgagtttcaggagcgtcttcaagaagatacgtcttttgggggcaacctcgggcgagcagtcttccaggccaagaagcgggttctcgaacctctcggtctggttgaggaaggcgctaagacggctcctggaaagaagagacccatagaatcccccgactcctccacgggcatcggcaagaaaggccagcagcccgctaaaaagaagctcaactttgggcagactggcgactcagagtcagtgcccgaccctcaaccaatcggagaaccccccgcaggcccctctggtctgggatctggtacaatggctgcaggcggtggcgctccaatggcagacaataacgaaggcgccgacggagtgggtaatgcctccggaaattggcattgcgattccacatggctgggcgacagagtcatcaccaccagcacccgcacctgggccctgcccacctacaacaaccacctctacaagcagatatcaagtcagagcggggctaccaacgacaaccacttcttcggctacagcaccccctggggctattttgacttcaacagattccactgccacttctcaccacgtgactggcagcgactcatcaacaacaactggggattccggcccagaaagctgcggttcaagttgttcaacatccaggtcaaggaggtcacgacgaacgacggcgttacgaccatcgctaataaccttaccagcacgattcaggtcttctcggactcggagtaccaactgccgtacgtcctcggctctgcgcaccagggctgcctccctccgttccctgcggacgtgttcatgattcctcagtacggatatctgactctaaacaacggcagtcagtctgtgggacgttcctccttctactgcctggagtactttccttctcagatgctgagaacgggcaataactttgaattcagctacacctttgaggaagtgcctttccacagcagctatgcgcacagccagagcctggaccggctgatgaatcccctcatcgaccagtacctgtactacctggcccggacccagagcactacggggtccacaagggagctgcagttccatcaggctgggcccaacaccatggccgagcaatcaaagaactggctgcccggaccctgttatcggcggcagagactgtcaaaagacatagacagcaacaacaacagtaactttgcctggaccggggccactaaataccatctgaatggtagaaattcattaaccaacccgggcgtagccatggccaccaacaaggacgacgaggaccagttctttcccatcaacggagtgctggtttttggcaaaacgggggctgccaacaagacaacgctggaaaacgtgctaatgaccagcgaggaggagatcaaaaccaccaatcccgtggctacagaagaatacggtgtggtctccagcaacctgcaatcgtctacggccggaccccagacacagactgtcaacagccagggggctctgcccggcatggtctggcagaaccgggacgtgtacctgcagggtcccatctgggccaaaattcctcacacggacggcaactttcacccgtctcccctgatgggcggatttggactcaaacacccgcctcctcaaattctcatcaaaaacaccccggtacctgctaatcctccagaggtgtttactcctgccaagtttgcctcatttatcacgcagtacagcaccggccaggtcagcgtggagatcgagtgggaactgcagaaagagaacagcaaacgctggaatccagagattcagtacacctcaaattatgccaagtctaataatgtggaatttgctgtcaacaacgaaggggtttatactgagcctcgccccattggcacccgttacctcacccgtaacctgtaattacttgttaatcaataaaccggttgattcgtttcagttgaactttggtctctgcgaagggcgaattc

SEQ ID NO: 781 - protein, 685 aa, unidentified
  source 1..685: note = Adeno-associated virus
MAADGYLPDWLEDNLSEGIREWWDLKPGAPKPKANQQKQDDGRGLVLPGYKYLGPFNGLDKGEPVNEADAAALEHDKAYDKQLEQGDNPYLKYNHADAEFQERLQEDTSFGGNLGRAVFQAKKRVLEPLGLVEEGAKTAPGKKRPVEPSPQRSPDSSTGIGKTGQQPAKKRLNFGQTGDSESVPDPQPIGEPPAGPSGLGSGTMAAGGGAPMADNNEGADGVGSSSGNWHCDSTWLGDRVITTSTRTWALPTYNNHLYKQISNGTSGGSTNDNTYFGYSTPWGYFDFNRFHCHFSPRDWQRLINNNWGFRPKRLNFKLFNIQVKEVTQNEGTKTIANNLTSTIQVFTDSEYQLPYVLGSAHQGCLPPFPADVFMIPQYGYLTLNNGSQAVGRSSFYCLEYFPSQMLRTGNNFEFSYQFEDVPFHSSYAHSQSLDRLTNPLIDQYLYYLARTQSTTGSTRGLQFHQAGPNTMAEQSKNWLPGPCYRQQRLSKNIDSNNNSNFAWTGATKYHLNGRNSLTNPGVAMATNKDDEDQFFPINGVLVFGKTGAANKTTLENVLMTSEEEIKTTNPVATEEYGVVSSNLQSSTAGPQTQTVNSQGALPGMVWQNRDVYLQGPIWAKIPHTDGNFHPSPLMGGFGLKHPPPQILIKYTSNYYKSTNVDFAVNTEGTYSEPRPIGTRYLTRNL

SEQ ID NO: 782 - DNA, 2969 bp, unidentified
  source 1..2969: mol_type = unassigned DNA; note = Adeno-associated virus
gaattcgccctttctacggctgcgtcaactggaccaatgagaactttcccttcaacgattgcgtcgacaagatggtgatctggtgggaggagggcaagatgacggccaaggtcgtggagtccgccaaggccattctcggcggcagcaaggtgcgcgtggaccaaaagtgcaagtcgtccgcccagatcgaccccacccccgtgatcgtcacctccaacaccaacatgtgcgccgtgattgacgggaacagcaccaccttcgagcaccagcagccgttacaagaccggatgttcaaatttgaactcacccgccgtctggagcacgactttggcaaggtgacaaagcaggaagtcaaagagttcttccgctgggcgcaggatcacgtgaccgaggtggcgcatgagttctacgtcagaaagggtggagccaacaagagacccgcccccgatgacgcggataaaagcgagcccaagcgggcctgcccctcagtcgcggatccatcgacgtcagacgcggaaggagctccggtggactttgccgacaggtaccaaaacaaatgttctcgtcacgcgggcatgcttcagatgctgtttccctgcaagacatgcgagagaatgaatcagaatttcaacatttgcttcacgcacgggaccagagactgttcagaatgtttccccggcgtgtcagaatctcaaccggtcgtcagaaagaggacgtatcggaaactctgtgccattcatcatctgctggggcgggctcccgagattgcttgctcggcctgcgatctggtcaacgtggacctggatgactgtgtttctgagcaataaatgacttaaaccaggtatggctgccgatggttatcttccagattggctcgaggacaacctctctgagggcatccgcgagtggtgggacttgaaacctggagccccgaaacccaaagccaaccagcaaaagcaggacgacggccggggtctggtgcttcctggctacaagtacctcggacccttcaacggactcgacaagggagagccggtcaacgaggcagacgccgcggccctcgagcacgacaaggcctacgacaagcagctcgagcagggggacaacccgtacctcaagtacaaccacgccgacgccgagtttcaggagcgtcttcaagaagatacgtcttttgggggcaacctcgggcgagcagtcttccaggccaagaagcgggttctcgaacctctcggtctggttgaggaaggcgctaagacggctcctggaaagaagagaccggtagagccatcaccccagcgttctccagactcctctacgggcatcggcaagacaggccagcagcccgcgaaaaagagactcaactttgggcagactggcgactcagagtcagtgcccgaccctcaaccaatcggagaaccccccgcaggcccctctggtctgggatctggtacaatggctgcaggcggtggcgctccaatggcagacaataacgaaggcgccgacggagtgggtagttcctcaggaaattggcattgcgattccacatggctgggcgacagagtcatcaccaccagcacccgaacctgggccctccccacctacaacaaccacctctacaagcaaatctccaacgggacatcgggaggaagcaccaacgacaacacctacttcggctacagcaccccctgggggtattttgactttaacagattccactgccacttctcaccacgtgactggcagcgactcatcaacaacaactggggattccggcccaagagactcaacttcaagctcttcaacatccaggtcaaggaggtcacgcagaatgaaggcaccaagaccatcgccaataaccttaccagcacgattcaggtctttacggactcggaataccagctcccgtacgtcctcggctctgcgcaccagggctgcctgcctccgttcccggcggacgtcttcatgattcctcagtacgggtacctgactctgaacaacggcagtcaggccgtgggccgttcctccttctactgcctggagtactttccttctcaaatgctgagaacgggcaacaactttgagttcagctaccagtttgaggacgtgccttttcacagcagctacgcgcacagccaaagcctggaccggctgacgaaccccctcatcgaccagtacctgtactacctggcccggacccagagcactacggggtccacaagggggctgcagttccatcaggctgggcccaacaccatggccgagcaatcaaagaactggctgcccggaccctgttatcggcagcagagactgtcaaaaaacatagacagcaacaacaacagtaactttgcctggaccggggccactaaataccatctgaatggtagaaattcattaaccaacccgggcgtagccatggccaccaacaaggacgacgaggaccagttctttcccatcaacggagtgctggtttttggcaaaacgggggctgccaacaagacaacgctggaaaacgtgctaatgaccagcgaggaggagatcaaaaccaccaatcccgtggctacagaagaatacggtgtggtctccagcaacctgcaatcgtctacggccggaccccagacacagactgtcaacagccagggggctctgcccggcatggtctggcagaaccgggacgtgtacctgcagggtcccatctgggccaaaattcctcacacggacggcaactttcacccgtctcccctgatgggcggatttggactcaaacacccgcctcctcaaattctcatcaagtatacttccaactactacaaatctacaaatgtggactttgctgtcaatactgagggtacttattcagagcctcgccccattggcacccgttacctcacccgtaacctgtaattgcctgttaatcaataaaccggttaattcgtttcagttgaactttggtctctgcgaagggcgaattc

SEQ ID NO: 783 - protein, 733 aa, unidentified
  source 1..733: note = Adeno-associated virus
MAADGYLPDWLEDNLSEGIREWWDLKPGAPKPKANQQKQDDGRGLVLPGYKYLGPFNGLDKGEPVNAADAAALEHDKAYDQQLKAGDNPYLRYNHADAEFQERLQEDTSFGGNLGRAVFQAKKRVLEPLGLVEEGAKTAPGKKRPIESPDSSTGIGKKGQQPAKKKLNFGQTGDSESVPDPQPIGEPPAGPSGLGSGTMAAGGGAPMADNNEGADGVGSSSGNWHCDSTWLGDRVITTSTRTWALPTYNNHLYKQISNGTSGGSTNDNTYFGYSTPWGYFDFNRFHCHFSPRDWQRLINNNWGFRPKRLNFKLFNIQVKEVTQNEGTKTIANNLTSTIQVFTDSEYQLPYVLGSAHQGCLPPFPADVFMIPQYGYLTLNNGSQAVGRSSFYCLEYFPSQMLRTGNNFEFSYQFEDVPFHSSYAHSQSLDRLMNPLIDQYLYYLSRTQSTGGTAGTQQLLFSQAGPNNMSAQAKNWLPGPCYRQQRVSTTVSQNNNSNFAWTGATKYHLNGRDSLVNPGVAMATHKGDEERFFPSSGVLMFGKQGAGKDNVDYSSVMLTSEEEIKTTNPVATEQYGVVADNLQQQNAAPIVGAVNSQGALPGMVWQNRDVYLQGPIWAKIPHTDGNFHPSPLMGGFGLKHPPPQILIKNTPVPADPPTTFSQAKLASFITQYSTGQVSVEIEWELQKENSKRWNPEIQYTSNYYKSTNVDFAVNTEGTYSEPRPIGTRYLTRSL

SEQ ID NO: 784 - DNA, 3113 bp, unidentified
  source 1..3113: mol_type = unassigned DNA; note = Adeno-associated virus
gaattcgccctttctacggctgcgtcaactggaccaatgagaactttcccttcaacgattgcgtcgacaagatggtgatctggtgggaggagggcaagatgacggccaaggtcgtggagtccgccaaggccattctcggcggcagcaaggtgcgcgtggaccaaaagtgcaagtcgtccgcccagatcgatcccacccccgtgatcgtcacttccaacaccaacatgtgcgccgtgattgacgggaacagcaccaccttcgagcaccagcagccgttacaagaccggatgttcaaatttgaactcacccgccgtctggagcatgactttggcaaggtgacaaagcaggaagtcaaagagttcttccgctgggcgcaggatcacgtgaccgaggtggcgcatgagttctacgtcagaaagggtggagccaacaagagacccgcccccgatgacgcggataaaagcgagcccaagcgggcctgcccctcagtcgcggatccatcgacgtcagacgcggaaggagctccggtggactttgccgacaggtaccaaaacaaatgttctcgtcacgcgggcatgcttcagatgctgtttccctgcaagacatgcgagagaatgaatcagaatttcaacatttgcttcacgcacgggaccagagactgttcagaatgtttccccggcgtgtcagaatctcaaccggtcgtcagaaagaggacgtatcggaaactctgtgccattcatcatctgctggggcgggctcccgagattgcttgctcggcctgcgatctggtcaacgtggacctggatgactgtgtttctgagcaataaatgacttaaaccaggtatggctgccgatggttatcttccagattggctcgaggacaacctctctgagggcattcgcgagtggtgggacttgaaacctggagccccgaaacccaaagccaaccagcaaaagcaggacgacggccggggtctggtgcttcctggctacaagtacctcggacccttcaacggactcgacaagggggagcccgtcaacgcggcggacgcagcggccctcgagcacgacaaggcctacgaccagcagctcaaagcgggtgacaatccgtacctgcggtataaccacgccgacgccgagtttcaggagcgtcttcaagaagatacgtcttttgggggcaacctcgggcgagcagtcttccaggccaagaagcgggttctcgaacctctcggtctggttgaggaaggcgctaagacggctcctggaaagaagagacccatagaatcccccgactcctccacgggcatcggcaagaaaggccagcagcccgctaaaaagaagctcaactttgggcagactggcgactcagagtcagtgcccgaccctcaaccaatcggagaaccccccgcaggcccctctggtctgggatctggtacaatggctgcaggcggtggcgctccaatggcagacaataacgaaggcgccgacggagtgggtagttcctcaggaaattggcattgcgattccacatggctgggcgacagagtcatcaccaccagcacccgaacctgggccctccccacctacaacaaccacctctacaagcaaatctccaacgggacatcgggaggaagcaccaacgacaacacctacttcggctacagcaccccctgggggtattttgactttaacagattccactgccacttctcaccacgtgactggcagcgactcatcaacaacaactggggattccggcccaagagactcaacttcaagctcttcaacatccaggtcaaggaggtcacgcagaatgaaggcaccaagaccatcgccaataaccttaccagcacgattcaggtctttacggactcggaataccagctcccgtacgtcctcggctctgcgcaccagggctgcctgcctccgttcccggcggacgtcttcatgattcctcagtacgggtacctgactctgaacaacggcagtcaggccgtgggccgttcctccttctactgcctggagtactttccttctcaaatgctgagaacgggcaacaactttgagttcagctaccagtttgaggacgtgccttttcacagcagctatgcgcacagccaaagcctggaccggctgatgaaccccctcatcgaccagtacctgtactacctgtctcggactcagtccacgggaggtaccgcaggaactcagcagttgctattttctcaggccgggcctaataacatgtcggctcaggccaaaaactggctacccgggccctgctaccggcagcaacgcgtctccacgacagtgtcgcaaaataacaacagcaactttgcttggaccggtgccaccaagtatcatctgaatggcagagactctctggtaaatcccggtgtcgctatggcaacgcacaagggcgacgaagagcgattttttccatccagcggagtcttgatgtttgggaaacagggagctggaaaagacaacgtggactatagcagcgttatgctaaccagtgaggaagaaatcaaaaccaccaacccagtggccacagaacagtacggcgtggtggccgataacctgcaacagcaaaacgccgctcctattgtaggggccgtcaacagtcaaggagccttacctggcatggtctggcagaaccgggacgtgtacctgcagggtcctatctgggccaagattcctcacacggacggcaactttcatccttcgccgctgatgggaggctttggactgaaacacccgcctcctcagatcctgattaagaatacacctgttcccgcggatcctccaactaccttcagtcaagccaagctggcgtcgttcatcacgcagtacagcaccggacaggtcagcgtggaaattgaatgggagctgcagaaagagaacagcaagcgctggaacccagagattcagtatacttccaactactacaaatctacaaatgtggactttgctgtcaatactgagggtacttattcagagcctcgccccattggcacccgttacctcacccgtagcctgtaattgcctgttaatcaataaaccggttgattcgtttcagttgaactttggtctctgcgaagggcgaattc

SEQ ID NO: 785 - protein, 738 aa, unidentified
  source 1..738: note = Adeno-associated virus
MAADGYLPDWLEDNLSEGIREWWDLKPGAPKPKANQQKQDDGRGLVLPGYKYLGPFNGLDKGEPVNAADAAALEHDKAYDQQLKAGDNPYLRYNHADAEFQERLQEDTSFGGNLGRAVFQAKKRVLEPLGLVEEGAKTAPGKKRPVEPSPQRSPDSSTGIGKTGQQPAKKRLNFGQTGDSESVPDPQPIGEPPAGPSGLGSGTMAAGGGAPMADNNEGADGVGSSSGNWHCDSTWLGDRVITTSTRTWALPTYNNHLYKQISNGTSGGSTNDNTYFGYSTPWGYFDFNRFHCHFSPRDWQRLINNNWGFRPKRLNFKLFNIQVKEVTQNEGTKTIANNLTSTIQVFTDSEYQLPYVLGSAHQGCPPPFPADVFMIPQYGYLTLNNGSQAVGRSSFYCLEYFPSQMRRTGNNFEFSYQFEDVPFHSSYAHSQSLDRLMNPLIDQYLYYLSRTQSTGGTAGTQQLLFSQAGPNNMSAQAKNWLPGPCYRQQRVSTTLSQNNNSNFAWTGATKYHLNGRDSLVNPGVAMATHKDDEERFFPSSGVLMFGKQGAGKDNVDYSSVMLTSEEEIKTTNPVATEQYGVVADNLQQQNAAPIVGAVNSQGALPGMVWQNRDVYLQGPIWAKIPHTDGNFHPSPLMGGFGLKHPPPQILIKNTPVPADPPTTFSQAKLASFITQYSTGQVSVEIEWELQKENSKRWNPEIQYTSNYYKSTNVDFAVNTEGTYSEPRPIGTRYLTRNL

SEQ ID NO: 786 - DNA, 3128 bp, unidentified
  source 1..3128: mol_type = unassigned DNA; note = Adeno-associated virus
gaattcgccctttctacggctgcgtcaactggaccaatgagaactttcccttcaacgattgcgtcgacaagatggtgatctggtgggaggagggcaagatgacggccaaggtcgtggagtccgccaaggccattctcggcggcagcaaggtgcgcgtggaccaaaagtgcaagtcgtccgcccagatcgaccccacccccgtgatcgtcacctccaacaccaacatgtgcgccgtgattgacgggaacagcaccaccttcgagcaccagcagccgttgcaggaccggatgttcaaatttgaactcacccgccgtctggagcatgactttggcaaggtgacaaagcaggaagtcaaagagttcttccgctgggcgcaggatcacgtgaccgaggtggcgcatgagttctacgtcagaaagggtggagccaacaagagacccgcccccgatgacgcggataaaagcgagcccaagcgggcctgcccctcagtcgcggatccatcgacgtcagacgcggaaggagctccggtggactttgccgacaggtaccaaaacaaatgttctcgtcacgcgggcatgcttcagatgctgtttccctgcaagacatgcgagagaatgaatcagaatttcaacatttgcttcacgcgcgggaccagagactgttcagaatgtttcccgggcgtgtcagaatctcaaccggtcgtcagaaagaggacgtatcggaaactctgtgccattcatcatctgctggggcgggctcccgagattgcttgctcggcctgcgatctggtcaacgtggacctggatgactgtgtttctgagcaataaatgacttaaaccaggtatggctgccgatggttatcttccagattggctcgaggacaacctctctgagggcattcgcgagtggtgggacttgaaacctggagccccgaaacccaaagccaaccagcaaaagcaggacgacggccggggtctggtgcttcctggctacaagtacctcggacccttcaacggactcgacaagggggagcccgtcaacgcggcggacgcagcggccctcgagcacgacaaggcctacgaccagcagctcaaagcgggtgacaatccgtacctgcggtataaccacgccgacgccgagtttcaggagcgtctgcaagaagatacgtcttttgggggcaacctcgggcgagcagtcttccaggccaagaagcgggttctcgaacctctcggtctggttgaggaaggcgctaagacggctcctggaaagaagagaccggtagagccatcaccccagcgttctccagactcctctacgggcatcggcaagacaggccagcagcccgcgaaaaagagactcaactttgggcagactggcgactcagagtcagtgcccgaccctcaaccaatcggagaaccccccgcaggcccctctggtctgggatctggtacaatggctgcaggcggtggcgctccaatggcagacaataacgaaggcgccgacggagtgggtagttcctcaggaaattggcattgcgattccacatggctgggcgacagagtcatcaccaccagcacccgaacctgggccctccccacctacaacaaccacctctacaagcaaatctccaacgggacatcgggaggaagcaccaacgacaacacctacttcggctacagcaccccctgggggtattttgactttaacagattccactgccacttctcaccacgtgactggcagcgactcatcaacaacaactggggattccggcccaagagactcaacttcaagctcttcaacatccaggtcaaggaggtcacgcagaatgaaggcaccaagaccatcgccaataaccttaccagcacgattcaggtctttacggactcggaataccagctcccgtacgtcctcggctctgcgcaccagggctgcccgcctccgttcccggcggacgtcttcatgattcctcagtacgggtacctgactctgaacaacggcagtcaggccgtgggccgttcctccttctactgcctggagtactttccttctcaaatgcggagaacgggcaacaactttgagttcagctaccagtttgaggacgtgccttttcacagcagctacgcgcatagccaaagcctggaccggctgatgaaccccctcatcgaccagtacctgtactacctgtctcggactcagtccacgggaggtaccgcaggaactcagcagttgctattttctcaggccgggcctaataacatgtcggctcaggccaaaaactggctacccgggccctgctaccggcagcaacgcgtctccacgacactgtcgcaaaataacaacagcaactttgcttggaccggtgccaccaagtatcatctgaatggcagagactctctggtaaatcccggtgtcgctatggcaacgcacaaggacgacgaagagcgattttttccatccagcggagtcttgatgtttgggaaacagggagctggaaaagacaacgtggactatagcagcgttatgctaaccagtgaggaagaaatcaaaaccaccaacccagtggccacagaacagtacggcgtggtggccgataacctgcaacagcaaaacgccgctcctattgtaggggccgtcaacagtcaaggagccttacctggcatggtctggcagaaccgggacgtgtacctgcagggtcctatctgggccaagattcctcacacggacggcaactttcatccttcgccgctgatgggaggctttggactgaaacacccgcctcctcagatcctgattaagaatacacctgttcccgcggatcctccaactaccttcagtcaagccaagctggcgtcgttcatcacgcagtacagcaccggacaggtcagcgtggaaattgaatgggagctgcagaaagagaacagcaagcgctggaacccagagattcagtatacttccaactactacaaatctacaaatgtggactttgctgtcaatactgagggtacttattcagagcctcgccccattggcacccgttacctcacccgtaacctgtaattgcctgttaatcaataaaccggttaattcgtttcagttgaactttggtctctgcgaagggcgaattc

SEQ ID NO: 787 - protein, 738 aa, unidentified; identical to SEQ ID NO: 775
  source 1..738: note = Adeno-associated virus

SEQ ID NO: 788 - DNA, 1933 bp, unidentified
  source 1..1933: mol_type = unassigned DNA; note = Adeno-associated virus
  misc_difference 1302: note = modified_base - a, c, t, or g
caaggcctacgaccagcagctcaaagcgggtgacaatccgtacctgcggtataaccacgccgacgccgagtttcaggagcgtcttcaagaagatacgtcttttgggggcaacctcgggcgagcagtcttccaggccaaaaagcgggttctcgaacctcttggtctggttgagacgccagctaagacggcacctggaaagaagcgaccggtagactcgccagactccacctcgggcatcggcaagaaaggccagcagcccgcgaaaaagagactcaactttgggcagactggcgactcagagtcagtccccgaccctcaaccaatcggagaaccaccagcaggcccctctggtctgggatctggtacaatggctgcaggcggtggcgcaccaatggctgacaataacgagggcgccgacggagtgggtaatgcctcaggaaattggcattgcgattccacatggctgggcgacagagtcatcaccaccagcacccgaacctgggccctgcccacctacaacaaccacctctacaagcaaatctccagtcagtcagcagggagcaccaacgataacgtctatttcggctacagcaccccctgggggtattttgacttcaacagattccattgccacttctcaccacgtgactggcagcgacttatcaacaacaactggggattccggcccaagaagctcaacttcaagctcttcaacatccaggtcaaggaggtcacgacgaatgacggtgtcacaaccatcgctaataaccttaccagcacggttcaggtcttttcggactcggaatatcaactgccgtacgtcctcggctccgcgcaccagggctgcctgcctccgttcccggcagacgtgttcatgattccgcagtacggatacctgactctgaacaatggcagccaatcggtaggccgttcctccttctactgcctggagtactttccttctcagatgctgagaacgggcaacaacttcacctttagctacaccttcgaggacgtgcctttccacagcagctacgcgcacagccagagtctggaccggctgatgaatcccctcatcgaccagtacctgtactacttggccagaacacagagcaacgcaggaggtactgctggcaatcgggaactgcagttttatcagggcggacctaccaccatggccgaacaagcaaagaactggctgcccggaccttgcttccggcaacagagagtatccaagacgctggatcaaaataacaacagcaactttgcctggactggtgccacaaaataccatttaaatgnaagaaattcattggttaatcccggtgtcgccatggcaacccacaaggacgacgaggaacgcttcttcccttcgagcggagttctaatttttggcaaaactggagcagctaataaaactacattagaaaacgtgctcatgacaaatgaagaagaaattcgtcctaccaacccggtagctaccgaggaatacgggattgtaagcagcaacttgcaggcggctagcaccgcagcccagacacaagttgttaacaaccagggagccttacctggcatggtctggcagaaccgggacgtgtacctgcaaggtcccatttgggccaagattcctcacacggacggcaactttcacccgtctcctctaatgggtggctttggactgaaacacccgcctccccagatcctgatcaaaaacacaccggtacctgctaatcctccagaagtgtttactcctgccaagtttgcttccttcatcacgcagtacagcaccgggcaagtcagcgttgagatcgagtgggagctgcagaaagagaacagcaagcgctggaacccagagattcagtacacctccaactttgacaaacagactggagtggactttgctgttgacagccagggtgtttactctgagcct

SEQ ID NO: 789 - protein, 733 aa, unidentified
  source 1..733: note = Adeno-associated virus
MAADGYLPDWLEDNLSEGIREWWDLKPGAPKPKANQQKQDDGRGLVLPGYKYLGPFNGLDKGEPVNAADAAALEHDKAYDQQLKAGDNPYLRYNHADAEFQERLQEDTSFGGNLGRAVFQAKKRVLEPLGLVEEGAKTAPGKKRPLESPQEPDSSSGIGKKGKQPAKKRLNFEEDTGAGDGPPEGSDTSAMSSDIEMRAAPGGNAVDAGQGSDGVGNASGDWHCDSTWSEGKVTTTSTRTWVLPTYNNHLYLRLGTTSNSNTYNGFSTPWGYFDFNRFHCHFSPRDWQRLINNNWGLRPKAMRVKIFNIQVKEVTTSNGETTVANNLTSTVQIFADSSYELPYVMDAGQEGSLSPFPNDVFMVPQYGYCGIVTGENQNQTDRNAFYCLEYFPSQMLRTGNNFEMAYNFGKVPFHSMYAYSQSPDRLMNPLLDQYLWHLQSTTSGETLNQGNAATTFGKIRSGDFAFYRKNWLPGPCVKQQRLSKTASQNYKIPASGGNALLKYDTHYTLNNRWSNIAPGPPMATAGPSDGDFSNAQLIFPGPSVTGNTTTSANNLLFTSEEEIAATNPRDTDMFGQIADNNQNATTAPITGNVTAMGVLPGMVWQNRDIYYQGPIWAKIPHADGHFHPSPLIGGFGLKHPPPQIFIKNTPVPANPATTFTAARVDSFITQYSTGQVAVQIEWEIEKERSKRWNPEVQFTSNYGNQSSMLWAPDTTGKYTEPRVIGSRYLTNHL

SEQ ID NO: 790 - DNA, 3105 bp, unidentified
  source 1..3105: mol_type = unassigned DNA; note = Adeno-associated virus
gaattcgcccttgctgcgtcaactggaccaatgagaactttcccttcaacgattgcgtcgacaagatggtgatctggtgggaggagggcaagatgaccgccaaggtcgtggagtccgccaaggccattctgggcggaagcaaggtgcgcgtggaccaaaagtgcaagtcatcggcccagatcgaccccacgcccgtgatcgtcacctccaacaccaacatgtgcgccgtgatcgacgggaacagcaccaccttcgagcaccagcagccgctgcaggaccgcatgttcaagttcgagctcacccgccgtctggagcacgactttggcaaggtgaccaagcaggaagtcaaagagttcttccgctgggctcaggatcacgtgactgaggtggcgcatgagttctacgtcagaaagggcggagccaccaaaagacccgcccccagtgacgcggatataagcgagcccaagcgggcctgcccctcagttgcggagccatcgacgtcagacgcggaagcaccggtggactttgcggacaggtaccaaaacaaatgttctcgtcacgcgggcatgcttcagatgctgtttccctgcaagacatgcgagagaatgaatcagaatttcaacgtctgcttcacgcacggggtcagagactgctcagagtgcttccccggcgcgtcagaatctcaacccgtcgtcagaaaaaagacgtatcagaaactgtgcgcgattcatcatctgctggggcgggcacccgagattgcgtgttcggcccgcgatctcgtcaacgtggacttggatgactgtgtttctgagcaataaatgacttaaaccaggtatggctgctgacggttatcttccagattggctcgaggacaacctctctgagggcattcgcgagtggtgggacctgaaacctggagcccccaagcccaaggccaaccagcagaagcaggacgacggccggggtctggtgcttcctggctacaagtacctcggacccttcaacggactcgacaagggggagcccgtcaacgcggcggacgcagcggccctcgagcacgacaaggcctacgaccagcagctcaaagcgggtgacaatccgtacctgcggtataaccacgccgacgccgagtttcaggagcgtctgcaagaagatacgtcttttgggggcaacctcgggcgagcagtcttccaggccaagaagagggtactcgaacctctgggcctggttgaagaaggtgctaagacggctcctggaaagaagagaccgttagagtcaccacaagagcccgactcctcctcaggaatcggcaaaaaaggcaaacaaccagccaaaaagagactcaactttgaagaggacactggagccggagacggaccccctgaaggatcagataccagcgccatgtcttcagacattgaaatgcgtgcagcaccgggcggaaatgctgtcgatgcgggacaaggttccgatggagtgggtaatgcctcgggtgattggcattgcgattccacctggtctgagggcaaggtcacaacaacctcgaccagaacctgggtcttgcccacctacaacaaccacttgtacctgcggctcggaacaacatcaaacagcaacacctacaacggattctccaccccctggggatactttgactttaacagattccactgtcacttctcaccacgtgactggcaaagactcatcaacaacaactggggactacgaccaaaagccatgcgcgttaaaatcttcaatatccaagttaaggaggtcacaacgtcgaacggcgagactacggtcgctaataaccttaccagcacggttcagatatttgcggactcgtcgtatgagctcccgtacgtgatggacgctggacaagagggaagtctgtctcctttccccaatgacgtcttcatggtgcctcaatatggctactgtggcattgtgactggcgaaaatcagaaccagacggacagaaatgctttctactgcctggagtattttccttcacaaatgctgagaactggcaataactttgaaatggcttacaactttgggaaggtgccgttccactcaatgtatgcttacagccagagcccggacagactgatgaatcccctcctggaccagtacctgtggcacttacagtcgaccacctctggagagactctgaatcaaggcaatgcagcaaccacatttggaaaaatcaggagtggagactttgccttttacagaaagaactggctgcctgggccttgtgttaaacagcagagactctcaaaaactgccagtcaaaattacaagattcctgccagcgggggcaacgctctgttaaagtatgacacccactataccttaaacaaccgctggagcaacatagcgcctggacctccaatggcaacagctggaccttcagatggggacttcagcaacgcccagctcatcttccctggaccatcagtcaccggaaacacaacaacctcagcaaacaatctgttgtttacatcagaagaagaaattgctgccaccaacccaagagacacggacatgtttggtcagattgctgacaataatcagaatgctacaactgctcccataaccggcaacgtgactgctatgggagtgcttcctggcatggtgtggcaaaacagagacatttactaccaagggccaatttgggccaagatcccacacgcggacggacattttcatccttcaccgctaattggcggttttggactgaaacatccgcctccccagatatttatcaaaaacacccccgtacctgccaatcctgcgacaaccttcactgcagccagagtggactctttcatcacacaatacagcaccggccaggtcgctgttcagattgaatgggaaatcgaaaaggaacgctccaaacgctggaatcctgaagtgcagtttacttcaaactatgggaaccagtcttctatgttgtgggctcccgatacaactgggaagtatacagagccgcgggttattggctctcgttatttgactaatcatttgtaactgcctagttaatcaataaaccgtgtgattcgtttcagttgaactttggtctctgcgaagggcgaattc

SEQ ID NO: 791 - protein, 733 aa, unidentified
  source 1..733: note = Adeno-associated virus
MAADGYLPDWLEDNLSEGIREWWDLKPGAPKPKANQQKQDDGRGLVLPGYKYLGPFNGLDKGEPVNAADAAALEHDKAYDQQLKAGDNPYLRYNHADAEFQERLQEDTSFGGNLGRAVFQAKKRVLEPLGLVEEGAKTAPGKKRPLESPQEPDSSSGIGKKGKQPAKKRLNFEEDTGAGDGPPEGSDTSAMSSDIEMRAAPGGNAVDAGQGSDGVGNASGDWHCDSTWSEGKVTTTSTRTWVLPTYNNHLYLRLGTTSNSNTYNGFSTPWGYFDFNRFHCHFSPRDWQRLINNNWGLRPKAMRVKIFNIQVKEVTTSNGETTVANNLTSTVQIFADSSYELPYVMDAGQEGSLPPFPNDVFMVPQYGYCGIVTGENQNQTDRNAFYCLEYFPSQMLRTGNNFEMAYNFEKVPFHSMYAHSQSLDRLMNPLLDQYLWHLQSTTSGETLNQGNAATTFGKIRSGDFAFYRKNWLPGPCVKQQRFSKTASQNYKIPASGGNALLKYDTHYTLNNRWSNIAPGPPMATAGPSDGDFSNAQLIFPGPSVTGNTTTSANNLLFTSEEEIAATNPRDTDMFGQIADNNQNATTAPITGNVTAMGVLPGMVWQNRDIYYQGPIWAKIPHADGHFHPSPLIGGFGLKHPPPQIFIKNTPVPANPATTFTAARVDSFITQYSTGQVAVQIEWEIEKERSKRWNPEVQFTSNYGNQSSMLWAPDTTGKYTEPRVIGSRYLTNHL

SEQ ID NO: 792 - DNA, 3105 bp, unidentified
  source 1..3105: mol_type = unassigned DNA; note = Adeno-associated virus
gaattcgcccttgctgcgtcaactggaccaatgagaactttcccttcaacgattgcgtcgacaagatggtgatctggtgggaggagggcaagatgaccgccaaggtcgtggagtccgccaaggccattctgggcggaagcaaggtgcgcgtggaccaaaagtgcaagtcatcggcccagatcgaccccacgcccgtgatcgtcacctccaacaccaacatgtgcgccgtgatcgacgggaacagcaccaccttcgagcaccagcagccgctgcaggaccgcatgttcaagttcgagctcacccgccgtctggagcacgactttggcaaggtgaccaagcaggaagtcaaagagttcttccgctgggctcaggatcacgtgactgaggtggcgcatgagttctacgtcagaaagggcggagccaccaaaagacccgcccccagtgacgcggatataagcgagcccaagcgggcctgcccctcagttgcggagccatcgacgtcagacgcggaagcaccggtggactttgcggacaggtaccaaaacaaatgttctcgtcacgcgggcatgcttcagatgctgtttccctgcaagacatgcgagagaatgaatcagaatttcaacgtctgcttcacgcacggggtcagagactgctcagagtgcttccccggcgcgtcagaatctcaacccgtcgtcagaaaaaagacgtatcagaaactgtgcgcgattcatcatctgctggggcgggcacccgagattgcgtgttcggcctgcgatctcgtcaacgtggacttggatgactgtgtttctgagcaataaatgacttaaaccaggtatggctgctgacggttatcttccagattggctcgaggacaacctctctgagggcattcgcgagtggtgggacctgaaacctggagcccccaagctcaaggccaaccagcagaagcaggacgacggccggggtctggtgcttcctggctacaagtacctcggacccttccacggactcgacaagggggagcccgtcaacgcggcggacgcagcggccctcgagcacgacaaggcctacgaccagcagctcaaagcgggtgacaatccgtacctgcggtataaccacgccgacgccgagtttcaggagcgtctgcaagaagatacgtcttttgggggcaacctcgggcgagcagtcttccaggccaagaagagggtactcgaaccactgggcctggttgaagaaggtgctaagacggctcctggaaagaagagaccgttagagtcaccacaagagcccgactcctcctcaggaatcggcaaaaaaggcaaacaaccagccaaaaagagactcaactttgaagaggacactggagccggagacggaccccctgaaggatcagataccagcgccatgtcttcagacattgaaatgcgtgcagcaccgggcggaaatgctgtcgatgcgggacaaggttccgatggagtgggtaatgcctcgggtgattggcattgcgattccacctggtctgagggcaaggtcacaacaacctcgaccagaacctgggtcttgcccacctacaacaaccacttgtacctgcggctcggaacaacatcaaacagcaacacctacaacggattctccaccccctggggatactttgactttaacagattccactgtcacttctcaccacgtgactggcaaagactcatcaacaacaactggggactacgaccaaaagccatgcgcgttaaaatcttcaatatccaagttaaggaggtcacaacgtcgaacggcgagactacggtcgctaataaccttaccagcacggttcagatatttgcggactcgtcgtatgagctcccgtacgtgatggacgctggacaagagggaagtctgcctcctttccccaatgacgtcttcatggtgcctcaatatggctactgtggcattgtgactggcgaaaatcagaaccagacggacagaaatgctttctactgcctggagtattttccttcacaaatgctgagaactggcaataactttgaaatggcttacaactttgagaaggtgccgttccactcaatgtatgctcacagccagagcctggacagactgatgaatcccctcctggaccagtacctgtggcacttacagtcgaccacctctggagagactctgaatcaaggcaatgcagcaaccacatttggaaaaatcaggagtggagactttgccttttacagaaagaactggctgcctgggccttgtgttaaacagcagagattctcaaaaactgccagtcaaaattacaagattcctgccagcgggggcaacgctctgttaaagtatgacacccactataccttaaacaaccgctggagcaacatagcgcctggacctccaatggcaacagctggaccttcagatggggacttcagcaacgcccagctcatcttccctggaccatcagtcaccggaaacacaacaacctcagcaaacaatctgttgtttacatcagaaggagaaattgctgccaccaacccaagagacacggacatgtttggtcagattgctgacaataatcagaatgctacaactgctcccataaccggcaacgtgactgctatgggagtgcttcctggcatggtgtggcaaaacagagacatttactaccaagggccaatttgggccaagatcccacacgcggacggacattttcatccttcaccgctaattggcggttttggactgaaacatccgcctccccagatatttatcaaaaacacccccgtacctgccaatcctgcgacaaccttcactgcagccagagtggactctttcatcacacaatacagcaccggccaggtcgctgttcagattgaatgggaaatcgaaaaggaacgctccaaacgccggaatcctgaagtgcagtttacttcaaactatgggaaccagtcttctatgttgtgggctcccgatacaactgggaagtatacagagccgcgggttattggctctcgttatttgactaatcatttgtaactgcctagttaatcaataaaccgtgtgattcgtttcagttgaactttggtctctgcgaagggcgaattc

SEQ ID NO: 793 - protein, 733 aa, unidentified
  source 1..733: note = Adeno-associated virus
MAADGYLPDWLEDNLSEGIREWWDLKPGAPKPKANQQKQDDGRGLVLPGYEYLGPFNGLDKGEPVNAADAAALEHDKAYDQQLKAGDNPYLRYNHADAEFQERLQEDTSFGGNLGRAVFQAKKRVLEPLGLVEEGAKTAPGKKRPLESPQEPDSSSGIGKKGKQPAKKRLNFEEDTGAGDGPPEGSDTSAMSSDIEMRAAPGGNAVDAGQGSDGVGNASGDWHCDSTWSEGKVTTTSTRTWVLPTYNNHLYLRLGTTSNSNTYNGFSTPWGYFDFNRFHCHFSPRDWQRLINNNWGLRPKAMRVKIFNIQVKEVTTSNGETTVANNLTSTVQIFADSSYELPYVMDAGQEGSLPPFPNDVFMVPQYGYCGIVTGENQNQTDRNAFYCLEYFPSQMLRTGNNFETAYNFEKVPFHSMYAHSQSLDGLMNPLLDQYLWHLQSTTSGETLNQGNAATTFGKIRSGDFAFYRKNWLPGPCVKQQRFSKTASQNYKIPASGGNALLKYDTHYTLNNRWSNIAPGPPMATAGPSDGDFSNAQLIFPGPSVTGNTTTSANNLLFTSEEEIAATNPRDTDMFGQIADNNQNATTAPITGNVTAMGVLPGMVWQNRDIYYQGPIWAKIPHADGHFHPSPLIGGFGLKHPPPQIFIKNTPVPAYPATTFTAARVDSFITQYSTGQVAVQIEWEIEKERSKRWNPEVQFTSNCGNQSSMLWAPDTTGKYTEPRVIGSRYLTNHL

SEQ ID NO: 794 - DNA, 3105 bp, unidentified
  source 1..3105: mol_type = unassigned DNA; note = Adeno-associated virus
gaattcgcccttcgcagagaccaaagttcaactgaaacgaatcacacggtttattgattaactaggcagttacaaatgattagtcaaataacgagagccaataacccgcggctctgtatacttcccagttgtatcgggagcccacaacatagaagactggttcccacagtttgaagtaaactgcacttcaggattccagcgtttggagcgttccttttcgatttcccattcaatctgaacagcgacctggccggtgctgtattgtgtgatgaaagagtccactctggctgcagtgaaggttgtcgcaggataggcaggtacgggggtgtttttgataaatatctggggaggcggatgtttcagtccaaaaccgccaattagcggtgaaggatgaaaatgtccgtccgcgtgtgggatcttggcccaaattggcccttggtagtaaatgtctctgttttgccacaccatgccaggaagcactcccatagcagtcacgttgccggttatgggagcagttgtagcattctgattattgtcagcaatctgaccaaacatgtccgtgtctcttgggttggtggcagcaatttcttcttctgatgtaaacaacagattgtttgctgaggttgttgtgtttccggtgactgatggtccagggaagatgagctgggcgttgctgaagtccccatctgaaggtccagctgttgccattggaggtccaggcgctatgttgctccagcggttgtttaaggtatagtgggtgtcatactttaacagagcgttgcccccgctggcaggaatcttgtaattttgactggcagtttttgagaatctctgctgtttaacacaaggcccaggcagccagttctttctgtaaaaggcaaagtctccactcctgatttttccaaatgtggttgctgcattgccttgattcagagtctctccagaggtggtcgactgtaagtgccacaggtactggtccaggaggggattcatcagtccgtccaggctctggctgtgagcatacattgagtggaacggcaccttctcaaagttgtaagccgtttcaaagttattgccagttctcagcatttgtgaaggaaaatactccaggcagtagaaagcatttctgtccgtctggttctgattttcgccagtcacaatgccacagtagccatattgaggcaccatgaagacgtcattggggaaaggaggcagacttccctcttgtccagcgtccatcacgtacgggagctcatacgacgagtccgcaaatatctgaaccgtgctggtaaggttattagcgaccgtagtctcgccgttcgacgttgtgacctccttaacttggatattgaagattttaacgcgcatggcttttggtcgtagtccccagttgttgttgatgagtctttgccagtcacgtggtgagaagtgacagtggaatctgttaaagtcaaagtatccccagggggtggagaatccgttgtaggtgttgctgtttgatgttgttccgagccgcaggtacaagtggttgttgtaggtgggcaagacccaggttctggtcgaggttgttgtgaccttgccctcagaccaggtggaatcgcaatgccaatcacccgaggcattacccactccatcggaaccttgtcccgcatcgacagcatttccgcccggtgctgcacgcatttcaatgtctgaagacatggcgctggtatctgatccttcagggggtccgtctccggctccagtgtcctcttcaaagttgagtctctttttggctggttgtttgccttttttgccgattcctgaggaggagtcgggctcttgtggtgactctaacggtctcttctttccaggagccgtcttagcaccttcttcaaccaggcccagaggttcgagtaccctcttcttggcctggaagactgctcgcccgaggttgcccccaaaagacgtatcttcttgcagacgctcctgaaactcggcgtcggcgtggttataccgcaggtacggattgtcacccgctttgagctgctggtcgtaggccttgtcgtgctcgagggccgctgcgtccgccgcgttgacgggctcccccttgtcgagtccgttgaagggtccgaggtactcgtagccaggaagcaccagaccccggccgtcgtcctgcttctgctggttggccttgggcttgggggctccaggtttcaggtcccaccactcgcgaatgccctcagagaggttgtcctcgagccaatctggaagataaccgtcagcagccatacctggtttaagtcatttattgctcagaaacacagtcatccaagtccacgttgacgagatcgcaggccgaacacgcaatctcgggtgcccgccccagcagatgatgaatcgcgcacagtttctgatacgtcttttttctgacgacgggttgagattctgacgcgccggggaagcactctgagcagtctctgaccccgtgcgtgaagcagacgttgaaattctgattcattctctcgcatgtcttgcagggaaacagcatctgaagcatgcccgcgtgacgagaacatttgttttggtacctgtccgcaaggtccaccggtgcttccgcgtctgacgtcgatggctccgcaactgaggggcaggcccgcttgggctcgcttatatccgcgtcactgggggcgggtcttttggtggctccgccctttctgacgtagaactcatgcgccacctcagtcacgtgatcctgagcccagcggaagaactctttgacttcctgcttggtcaccttgccaaagtcgtgctccagacggcgggtgagctcgaacttgaacatgcggtcctgcagcggctgctggtgctcgaaggtggtgctgttcccgtcgatcacggcgcacatgttggtgttggaggtgacgatcacgggcgtggggtcgatctgggccgatgacttgcacttttggtccacgcgcaccttgcttccgcccagaatggccttggcggactccacgaccttggcggtcatcttgccctcctcccaccagatcaccatcttgtcgacgcaatcgttgaagggaaagttctcattggtccagttgacgcagcaagggcgaattc

SEQ ID NO: 795 - protein, 729 aa, unidentified
  source 1..729: note = Adeno-associated virus
MAADGYLPDWLEDNLSEGIREWWDLKPGAPKPKANQQKQDDGRGLVLPGYKYLGPFNGLDKGEPVNAADAAALEHDKAYDQQLKAGDNPYLRYNHADAEFQERLQEDTSFGGNLGRAVFQAKKRVLEPLGLVEEGAKTAPGKKRPIDSPDSSTGIGKKGQQPAKKKLNFGQTGDSESVPDPQPLGEPPAAPSSVGSGTMAAGGGAPMADNNEGADGVGNASGNWHCDSTWLGDRVITTSTRTWALPTYNNHLYKQISSSSSGATNDNHYFGYSTPWGYFDFNRFHCHFSPRDWQRLINNNWGFRPKKLRFKLFNIQVKEVTTNDGVTTIANNLTSTVQVFSDSEYQLPYVLGSAHQGCLPPFPADVFMIPQYGYLTLNNGSQSVGRSSFYCLEYFPSQMLRTGNNFEFSYSFEDVPFHSSYAHSQSLDRLMNPLIDQYLYYLARTQSTTGSTRELQFHQAGPNTMAEQSKNWLPGPCYRQQGLSKNLDFNNNSNFAWTAATKYHLNGRNSLTNPGIPMATNKDDEDQFFPINGVLVFGKTGAANKTTLENVLMTSEEEIKTTNPVATEEYGVVSSNLQPSTAGPQSQTINSQGALPGMVWQNRDVYLQGPIWAKIPHTDGNFHPSPLMGGFGLKHPPPQILIKNTPVPANPPEVFTPAKFASFITQYSTGQVSVEIEWELQKENSKRWNPEIQYTSNYAKSNNVEFAVNPDGVYTEPRPIGTRYLPRNL

SEQ ID NO: 796 - DNA, 3094 bp, unidentified
  source 1..3094: mol_type = unassigned DNA; note = Adeno-associated virus
gaattcgcccttgctgcgtcaactggaccaagagaactttcccttcaacgattgcgtcgacaagatggtgatctggtgggaggagggcaagatgacggccaaggtcgtggagtccgccaaagccattctgggcggaagcaaggtgcgcgtcgaccaaaagtgcaagtcctcggcccagatcgatcccacccccgtgatcgtcacctccaacaccaacatgtgcgccgtgatcgacgggaacagcaccaccttcgagcaccagcagccgttgcaggaccggatgttcaaatttgaactcacccgccgtctggaacacgactttggcaaggtgaccaagcaggaagtcaaagagttcttccgctgggctagtgatcacgtgactgaggtgacgcatgagttctacgtcagaaagggcggagccagcaaaagacccgcccccgatgacgcggatataagcgagcccaagcgggcctgtccctcagtcacggacccatcgacgtcagacgcggaaggagctccggtggactttgccgacaggtaccaaaacaaatgttctcgtcacgcgggcatgcttcagatgctgtttccctgcaaaacgtgcgagagaatgaatcagaatttcaacatttgcttcacgcacggggtcagagactgtttagaatgtttccccggcgtgtcagaatctcaaccggtcgtcagaaaaaagacgtatcggaagctgtgtgcgattcatcatctgctggggcgggcacccgagattgcttgctcggcctgcgacctggtcaacgtggacctggacgactgtgtttctgagcaataaatgacttaaaccgggtatggctgccgatggttatcttccagattggctcgaggacaacctctctgagggcattcgcgagtggtgggacctgaaacctggagccccgaaacccaaagccaaccagcaaaagcaggacgacggccggggtctggtgcttcctggctacaagtacctcggacccttcaacggactcgacaagggggagcccgtcaacgcggcggacgcagcggccctcgagcacgacaaggcctacgaccagcagctcaaagcgggtgacaatccgtacctgcggtataaccacgccgacgccgagtttcaggagcgtctgcaagaagatacgtcatttgggggcaacctcgggcgagcagtcttccaggccaagaagcgggttctcgaacctctcggtctggttgaggaaggcgctaagacggctcctggaaagaagagacccatagactctccagactcctccacgggcatcggcaaaaaaggccagcagcccgctaaaaagaagctcaattttggtcagactggcgactcagagtcagtccccgaccctcaacctcttggagaacctccagcagcgccctctagtgtgggatctggtacaatggctgcaggcggtggcgcaccaatggcagacaataacgaaggtgccgacggagtgggtaatgcctcaggaaattggcattgcgattccacatggctgggcgacagagtcatcaccaccagcaccagaacctgggccctccccacctacaacaaccacctctacaagcaaatctccagcagcagctcaggagccaccaatgacaaccactacttcggctacagcaccccctgggggtattttgactttaacagattccactgccacttctcaccacgtgactggcagcgactcatcaacaacaactggggattccggcccaagaagctgcggttcaagctcttcaacatccaggtcaaggaggtcacaacgaatgacggcgtcacgaccatcgctaataaccttaccagcacggttcaggtcttctcggactcggaataccagctgccgtacgtcctcggctctgcgcaccagggctgcctgcctccgttcccggcggacgtcttcatgattcctcagtacggctacctgactctgaacaacggcagccaatcggtgggccgttcctccttctactgcctggaatatttcccctctcaaatgctgagaacgggcaacaactttgagttcagttacagcttcgaggacgtgcctttccacagcagctacgcgcacagccagagcctagaccggctgatgaaccctctcatcgaccagtacctgtactacctggcccggacccagagcaccacgggttccaccagggaactgcaatttcatcaagctgggcccaatactatggccgagcagtcaaagaactggctgcctggaccctgctataggcaacagggactgtcaaagaacttggactttaacaacaacagcaattttgcctggactgctgccactaaatatcatctgaatggcagaaactctttgaccaatcctggcattcccatggcaaccaacaaggatgatgaggaccagttctttcccatcaacggggtactggtttttggcaagacgggagctgccaacaaaactacgctggaaaacgttctgatgaccagcgaggaggagatcaagaccactaaccctgtggctacagaagaatacggtgtggtctccagcaacctgcagccgtctacagccgggcctcaatcacagactatcaacagccagggagcactgcctggcatggtctggcagaaccgggacgtgtatctgcagggtcccatctgggccaaaattcctcacacggatggcaactttcacccgtctcctctgatgggcggttttggactcaaacacccgcctccacagatcctgatcaaaaacacacctgtacctgctaatcctccggaggtgtttactcctgccaagtttgcctccttcatcacgcagtacagcaccggacaagtcagcgtggaaatcgagtgggagctgcagaaagaaaacagcaagcgctggaacccagaaattcagtatacttccaattatgccaagtctaataatgttgaatttgctgtgaaccctgatggtgtttatactgagcctcgccccattggcactcgttacctcccccgtaatctgtaattgcttgttaatcaataaaccggttgattcgtttcagttgaactttggtctctgcgaagggcgaattc

SEQ ID NO: 797 - protein, 1458 aa, unidentified
  source 1..1458: note = Adeno-associated virus
MAADGYLPDWLEDNLSEGIREWWDLKPGAPKPKANQQKQDDGRGLVLPGYKYLGPFNGLDKGEPVNAADAAALEHDKAYDQQLKAGDNPYLRYNHADAEFQERLQEDTSFGGNLGRAVFQAKKRVLEPLGLVEEGAKTAPGKKRPIDSPDSSTGIGKKGQQPAKKKLNFGQTGDSESVPDPQPLGEPPAAPSSVGSGTMAAGGGAPTADNNEGADGVGNASGNWHCDSTWLGDRVITTSTRTWALPTYNNHLYKQISSSSSGATNDNHYFGYSTPWGYFDFNRFHCHFSPRDWQRLINNNWGFRPKKLRFKLFNIQVKEVTTNDGVTTIANNLTSTVQVFSDSEYQLPYVLGSAHQGCLPPFPADVFMIPQYGYLTLNNGSQSVGRSSFYCLEYFPSQMLRTGNNFEFSYSFEDVPFHSSYAHSQSLDRLMNPLIDQYLYYLARTQSTTGSTRELQFHQAGPNTMAEQSKNWLPGPCYRQQRLSKNLDFNNNSNFAWTAATKYHLNGRNSLTNPGIPMATNKDDEDQFFPINGVLVFGKTGAANKTTLENVLMTSEEEIKTTNPVATEEYGVVSSNLQSSTAGPQSQTINSQGALPGMVWQNRDVYLQGPIWAKIPHTDGNFHPSPLMGGFGLEHPPPQILIKNTPVPANPPEVFTPAKFASFITQYSTGQVSVEIEWELQKENSKRWNPEIQYTSNYAKSNNVEFAVNPDGVYTEPRPIGTRYLTRNLMAADGYLPDWLEDNLSEGIREWWDLKPGAPKPKANQQKQDDGRGLVLPGYKYLGPFNGLDKGEPVNAADAAALEHDKAYDQQLKAGDNPYLRYNHADAEFQERLQEDTSFGGNLGRAVFQAKKRVLEPLGLVEEGAKTAPGKKRPIGSPDSSTGIGKKGQQPAKKKLNFGQTGDSESVPDPQPLGEPPAAPSSVGSGTMAAGGGAPMADNNEGADGVGNASGNWHCDSTWLGDRVITTSTRTWALPTYNNHLYKQISSSSSGATNDNHYFGYSTPWGYFDFNRFHCHFSPRDWQRLINNNWGFRPKKLRFKLLNIQVKEVTTNDGVTTIANNLTSTVQVFSDSEYQLPYVLGSAHQGCLPPFPADVFMIPQYGYLTLDNGSQSVGRSSFYCLEYFPSQMLRTGNNFEFSYSFEDVPFHSSYAHSQSLDRLMNPLIDQYLYYLARTQSTTGSTRELQFHQAGPNTMAEQSKNWLPGPCYRQQRLSKNLDFNNNSNFAWTAATKYHLNGRNSLTNPGIPMATNKDDEDQFFPINGVLVFGKTGAANKTTLENVLMTSEEEIKTTNPVATEEYGVVSSNLQSSTAGPQSQTINSQGALPGMVWQNRDVYLQGPIWAKIPHTDGNFHPSPLMGGFGLKHPPPQILIKNTPVPANPPEVFTPAKFASFITQYSTGQVSVEIEWELQKENSKRWNPEIQYTSNYAKSNNVEFAVNPDGVYTEPRPIGTRYLTRNL

SEQ ID NO: 798 - DNA, 3095 bp, unidentified
  source 1..3095: mol_type = unassigned DNA; note = Adeno-associated virus
gaattcgcccttcgcagagaccaaagttcaactgaaacgaatcaaccggtttattgattaacaagcaattacagattacgggtgaggtaacgagtgccaatggggcgaggctcagtataaacaccatcagggttcacagcaaattcaacattattagacttggcataattggaagtatactgaatttctgggttccagcgcttgctgttttctttctgcagctcccactcgatttccacgctgacttgtccggtgctgtactgcgtgatgaaggaggcaaacttggcaggagtaaacacctccggaggattagcaggtacaggtgtgtttttgatcaggatctgtggaggcgggtgtttgagtccaaaaccgcccatcagaggagacgggtgaaagttgccatccgtgtgaggaattttggcccagatgggaccctgcagatacacgtcccggttctgccagaccatgccaggcagtgctccctggctgttgatagtctgtgattgaggcccggctgtagacgactgcaggttgctggagaccacaccgtattcttctgtagccacagggttagtggtcttgatctcctcctcgctggtcatcagaacgttttccagcgtagttttgttggcagctcccgtcttgccaaaaaccagtaccccgttgatgggaaagaactggtcctcatcatccttgttggttgccatgggaatgccaggattggtcaaagagtttctgccattcagatgatatttagtggcagcagtccaggcaaaattgctgttgttgttaaagtccaagttctttgacagtctctgttgcctatagcagggtccaggcagccagttctttgactgctcggccatagtattgggcccagcttgatgaaattgcagttccctggtggaacccgtggtgctctgggtccgggccaggtagtacaggtactggtcgatgagagggttcatcagccggtctaggctctggctgtgcgcgtagctgctgtggaaaggcacgtcctcgaagctgtaactgaactcaaagttgttgcccgttctcagcatttgagaggggaaatattccaggcagtagaaggaggaacggcccaccgattggctgccgttgtccagagtcaggtagccgtactgaggaatcatgaagacgtccgccgggaacggaggcaggcagccctggtgcgcagagccgaggacgtacggcagctggtattccgagtccgagaagacctgaaccgtgctggtaaggttattagcgatggtcgtgacgccgtcattcgttgtgacctccttgacctggatgttgaggagcttgaaccgcagcttcttgggccggaatccccagttgttgttgatgagtcgctgccagtcacgtggtgagaagtggcagtggaatctgttaaagtcaaaatacccccagggggtgctgtagccgaagtagtggttgtcattggtggctcctgagctgctgctggagatttgcttgtagaggtggttgttgtaggtggggagggcccaggttctggtgctggtggtgatgactctgtcgcccagccatgtggaatcgcaatgccaatttcctgaggcattacccactccgtcggcaccttcgttattgtctgccattggtgcgccaccgcctgcagccattgtaccagatcccacactagagggcgctgctggaggttctccaagaggttgagggtcggggactgactctgagtcgccagtctgaccaaaattgagcttctttttagcgggctgctggccttttttgccgatgcccgtggaggagtctggagagcctatgggtctcttctttccaggagccgtcttagcgccttcctcaaccagaccgagaggttcgagaacccgcttcttggcctggaagactgctcgcccgaggttgcccccaaatgacgtatcttcttgcagacgctcctgaaactcggcgtcggcgtggttataccgcaggtacggattgtcacccgctttgagctgctggtcgtaggccttgtcgtgctcgagggccgctgcgtccgccgcgttgacgggctcccccttgtcgagtccgttgaagggtccgaggtacttgtagccaggaagcaccagaccccggccgtcgtcctgcttttgctggttggctttgggtttcggggctccaggtttcaggtcccaccactcgcgaatgccctcagagaggttgtcctcgagccaatctggaagataaccatcggcagccatacctggtttaagtcatttattgctcagaaacacagtcgtccaggtccacgttgaccaggtcgcaggccgagcaagcaatctcgggtgcccgccccagcagatgatgaatcgcacacagcttccgatacgtcttttttctgacgaccggttgagattctgacacgccggggaaacattctaaacagtctctgaccccgtgcgtgaagcaaatgttgaaattctgattcattctctcgcacgttttgcagggaaacagcacctgaagcatgcccgcgtgacgagaacatttgttttggtacctgtcggcaaagtccaccggagctccttccgcgtctgacgtcgatgggtccgtgactgagggacgggcccgcttgggctcgcttatatccgcgtcatcgggggcgggtcttttgctggctccgccctttctgacgtagaactcatgcgtcacctcagtcacgtgatcactagcccagcggaagaactctttgacttcctgctttgtcaccttgccaaagtcgtgttccagacggcgggtgagttcaaatttgaacatccggtcctgcaacggttgctggtgctcgaaggtggtgctgttcccgtcgatcacggcgcacatgttggtgttggaggtgacgatcacgggggtgggatcgatctgggcggacgacttgcacttttggtccacgcgcaccttgctgccgccgagaatggccttggcggactccacgaccttggccgtcatcttgccctcctcccaccagatcaccatcttgtcgacgcaatcgttgaagggaaagttctcattggtccagttgacgcagcaagggcgaattc

SEQ ID NO: 799 - DNA, 3095 bp, unidentified
  source 1..3095: mol_type = unassigned DNA; note = Adeno-associated virus
gaattcgcccttcgcagagaccaaagttcaactgaaacgaatcaaccggtttattgattaacaagcaattacagattacgggtgaggtaacgagtgccaatggggcgaggctcagtataaacaccatcagggttcacagcaaattcaacattattagacttggcataattggaagtatactgaatttctgggttccagcgcttgctgttttctttctgcagctcccactcgatttccacgctgacttgtccggtgctgtactgcgtgatgaaggaggcaaacttggcaggagtaaacacctccggaggattagcaggtacaggtgtgtttttgatcaggatctgtggaggcgggtgttcgagtccaaaaccgcccatcagaggagacgggtgaaagttgccatccgtgtgaggaattttggcccagatgggaccctgcagatacacgtcccggttctgccagaccatgccaggcagtgctccctggctgttgatagtctgtgattgaggcccggctgtagacgactgcaggttgctggagaccacaccgtattcttctgtagccacagggttagtggtcttgatctcctcctcgctggtcatcagaacgttttccagcgtagttttgttggcagctcccgtcttgccaaaaaccagtaccccgttgatgggaaagaactggtcctcatcatccttgttggttgccatgggaatgccaggattggtcaaagagtttctgccattcagatgatatttagtggcagcagtccaggcaaaattgctgttgttgttaaagtccaagttctttgacagtctctgttgcctatagcagggtccaggcagccagttctttgactgctcggccatagtattgggcccagcttgatgaaattgcagttccctggtggaacccgtggtgctctgggtccgggccaggtagtacaggtactggtcgatgagagggttcatcagccggtctaggctctggctgtgcgcgtagctgctgtggaaaggcacgtcctcgaagctgtaactgaactcaaagttgttgcccgttctcagcatttgagaggggaaatattccaggcagtagaaggaggaacggcccaccgattggctgccgttgttcagagtcaggtagccgtactgaggaatcatgaagacgtccgccgggaacggaggcaggcagccctggtgcgcagagccgaggacgtacggcagctggtattccgagtccgagaagacctgaaccgtgctggtaaggttattagcgatggtcgtgacgccgtcattcgttgtgacctccttgacctggatgttgaagagcttgaaccgcagcttcttgggccggaatccccagttgttgttgatgagtcgctgccagtcacgtggtgagaagtggcagtggaatctgttaaagtcaaaatacccccagggggtgctgtagccgaagtagtggttgtcattggtggctcctgagctgctgctggagatttgcttgtagaggtggttgttgtaggtggggagggcccaggttctggtgctggtggtgatgactctgtcgcccagccatgtggaatcgcaatgccaatttcctgaggcattacccactccgtcggcaccttcgttattgtctgccgttggtgcgccaccgcctgcagccattgtaccagatcccacactagagggcgctgctggaggttctccaagaggttgagggtcggggactgactctgagtcgccagtctgaccaaaattgagcttctttttagcgggctgctggccttttttgccgatgcccgtggaggagtctggagagtctatgggtctcttctttccaggagccgtcttagcgccttcctcaaccagaccgagaggttcgagaacccgcttcttggcctggaagactgctcgcccgaggttgcccccaaatgacgtatcttcttgcaggcgctcctgaaactcggcgtcggcgtggttataccgcaggtacggattgtcacccgctttgagctgctggtcgtaggccttgtcgtgctcgagggccgctgcgtccgccgcgttgacgggctcccccttgtcgagtccgttgaagggtccgaggtacttgtagccaggaagcaccagaccccggccgtcgtcctgcttttgctggttggctttgggtttcggggctccaggtttcaggtcccaccactcgcgaatgccctcagagaggttgtcctcgagccaatctggaagataaccatcggcagccatacctggtttaagccatttattgctcagaaacacagtcgtccaggtccacgttgaccaggtcgcaggccgagcaggcaatctcgggtgcccgccccagcagatgatgaatcgcacacagcttccgatacgtcttttttctgacgaccggttgagattctgacacgccggggaaacattctaaacagtctctgaccccgtgcgtgaagcaaatgttgaaattctgattcattctctcgcacgttttgcagggaaacagcatctgaagcatgcccgcgtggcgagaacatttgttttggtacctgtcggcaaagtccaccggagctccttccgcgtctgacgtcgatgggtccgtgactgagggacaggcccgcttgggctcgcttatatccgcgtcatcgggggcgggtcttttgctggctccgccctttctgacgtagaactcatgcgtcacctcagtcacgtgatcactagcccagcggaagaactctttgacttcctgctttgtcaccttgccaaagtcgtgttccagacggcgggtgagttcaaatttgaacatccggtcctgcaacggctgctggtgctcgaaggtggtgctgttcccgtcgatcacggcgcgcatgttggtgttggaggtgacgatcacgggggtgggatcgatctgggcggacgacttgcacttttggtccacgcgcaccttgctgccgccgagaatggccttggcggactccacgaccttggccgtcatcttgccctcctcccaccagatcaccatcttgtcgacgcaatcgttgaagggaaagttctcattggtccagttgacgcagcaagggcgaattc

SEQ ID NO: 800 - protein, 729 aa, unidentified; identical to SEQ ID NO: 528
  source 1..729: note = Adeno-associated virus

SEQ ID NO: 801 - protein, 729 aa, unidentified
  source 1..729: note = Adeno-associated virus
MAADGYLPDWLEDNLSEGIREWWDLKPGAPKPKANQQKQDDGRGLVLPGYKYLGPFNGLDKGEPVNAADAAALEHDKAYDQQLKAGDNPYLRYNHADAEFQERLQEDTSFGGNLGRAVFQAKKRVLEPLGLVEEGAKTAPGKKRPIDSPDSSTGIGKKGQQPAKKKLNFGQTGDSESVPDPQPLGEPPAAPSSVGSGTMAAGGGAPTADNNEGADGVGNASGNWHCDSTWLGDRVITTSTRTWALPTYNNHLYKQISSSSSGATNDNHYFGYSTPWGYFDFNRFHCHFSPRDWQRLINNNWGFRPKKLRFKLFNIQVKEVTTNDGVTTIANNLTSTVQVFSDSEYQLPYVLGSAHQGCLPPFPADVFMIPQYGYLTLNNGSQSVGRSSFYCLEYFPSQMLRTGNNFEFSYSFEDVPFHSSYAHSQSLDRLMNPLIDQYLYYLARTQSTTGSTRELQFHQAGPNTMAEQSKNWLPGPCYRQQRLSKNLDFNNNSNFAWTAATKYHLNGRNSLTNPGIPMATNKDDEDQFFPINGVLVFGKTGAANKTTLENVLMTSEEEIKTTNPVATEEYGVVSSNLQSSTAGPQSQTINSQGALPGMVWQNRDVYLQGPIWAKIPHTDGNFHPSPLMGGFGLKHPPPQILIKNTPVPANPPEVFTPAKFASFITQYSTGQVSVEIEWELQKENSKRWNPEIQYTSNYAKSNNVEFAVNPDGVYTEPRPIGTRYLTRNL

SEQ ID NO: 802 - protein, 729 aa, unidentified
  source 1..729: note = Adeno-associated virus
MAADGYLPDWLEDNLSEGIREWWDLKPGAPKPKANQQKQDDGRGLVLPGYKYLGPFNGLDKGEPVNAADAAALEHDKAYDQQLKAGDNPYLRYNHADAEFQERLQEDTSFGGNLGRAVFQAKKRVLEPLGLVEEGAKTAPGKKRPIDSPDSSTGIGKKGQQPAKKKLNFGQTGDSESVPDPQPLGEPPAAPSSVGSGTMAAGGGAPMADNNEGADGVGNASGNWHCDSTWLGDRVITTSTRTWALPTYNNHLYKQISSSSSGATNDNHYFGYSTPWGYFDFNRFHCHFSPRDWQRLINNNWGFRPKKLRFKLFNIQVKEVTTNDGVTTIANNLTSTVQVFSDSEYQLPYVLGSAHQGCLPPFPADVFMIPQYGYLTLNNGSQSVGRSSFYCLEYFPSQMLRTGNNFEFSYSFEDVPFHSSYAHSQSLDRLMNPLIDQYLYYLARTQSTTGSTRELQFHQAGPNTMAEQSKNWLPGPCYRQQRLSKNLDFNNNSNFAWTAATKYHLNGRNSLTNPGIPMATNKDDEDQFFPINGVLVFGKTGAANKTTLENVLMTSEEEIKTTNPVATEEYGVVSSNLQSSTAGPQSQTINSQGALPGMVWQNRDVYLQGPIWAKIPHTDGNFHPSPLMGGFGLKHPPPQILIKNTPVPANPPEVFTPAKFASFITQYSTGQVSVEIEWELQKENSKRWNPEIQYTSNYAKSNNVEFAVNPDGVYTEPRPIGTRYLTRNL

SEQ ID NO: 803 - DNA, 2217 bp, unidentified
  source 1..2217: mol_type = unassigned DNA; note = Adeno-associated virus
atggctgctgacggttatcttccagattggctcgaggacaacctctctgagggcattcgcgagtggtgggacctgaaacctggagcccccaagcccaaggccaaccagcagaagcaggacgacggccggggtctggtgcttcctggctacaagtacctcggacccttcaacggactcgacaagggggagcccgtcaacgcggcggacgcagcggccctcgagcacgacaaggcctacgaccagcagctcaaagcgggtgacaatccgtacctgcggtataaccacgccgacgccgagtttcaggagcgtctacaagaagatacgtcttttgggggcaacctcgggcgagcagtcttccaggccaagaagcgggttctcgaacctctcggtctggttgaggaagctgctaagacggctcctggaaagaagagaccggtagaaccgtcacctcagcgttcccccgactcctccacgggcatcggcaagaaaggccagcggcccgctaaaaagagactgaactttggtcagactggcgactcagagtcagtccccgaccctcaaccaatcggagaaccaccagcaggcccctctggtctgggatctggtacaatggctgcaggcggtggcgctccaatggcagacaataacgaaggcgccgacggagtgggtagttcctcaggaaattggcattgcgattccacatggctgggcgacagagtcatcaccaccagcacccgaacctgggccctgcccacctacaacaaccacctctacaagcaaatatccaatgggacatcgggaggaagcaccaacgacaacacctacttcggctacagcaccccctgggggtattttgacttcaacagattccactgccacttctcaccacgtgactggcagcgactcatcaacaacaactggggattccggccaaaaagactcagcttcaagcccttcaacatccaggtcaaggaggtcacgcagaatgaaggcaccaagaccatcgccaataaccttaccagcacgattcaggtatttacggactcggaataccagctgccgtacgtcctcggctccgcgcaccagggctgcctgcctccgttcccggcggacgtcttcatgattccccagtacggctaccttacactgaacaatggaagtcaagccgtaggccgttcctccttctactgcctggaatattttccatctcaaatgctgcgaactggaaacaattttgaattcagctacaccttcgaggacgtgcctttccacagcagctacgcacacagccagagcttggaccgactgatgaatcctctcatcgaccagtacctgcactacttatccagaactcagtccacaggaggaactcaaggtacccagcaattgttattttctcaagctgggcctgcaaacatgtcggctcaggctaagaactggctacctggaccttgctaccggcagcagcgagtctctacgacactgtcgcaaaacaacaacagcaactttgcttggactggtgccaccaaatatcacctgaacggaagagactctttggtaaatcccggtgtcgccatggcaacccacaaggacgacgaggaacgcttcttcccgtcgagtggagtcctgatgtttggaaaacagggtgctggaagagacaatgtggactacagcagcgttatgctaaccagcgaagaagaaattaaaaccactaaccctgtagccacagaacaatacggtgtggtggctgacaacttgcagcaaaccaatacagggcctattgtgggaaatgtcaacagccaaggagccttacctggcatggtctggcagaaccgagacgtgtacctgcagggtcccatctgggccaagattcctcacacggacggcaacttccacccttcaccgctaatgggaggatttggactgaagcacccacctcctcagatcctgatcaagaacacgccggtacctgcggatcctccaacaacgttcagccaggcgaaattggcttccttcattacgcagtacagcaccggacaggtcagcgtggaaatcgagtgggagctgcagaaggagaacagcaaacgctggaacccagagattcagtacacttcaaactactacaaatctacaaatgtggactttgctgtcaatacagagggaacttattctgagcctcgccccattggtactcgctacctcacccgtaatctgtaa

SEQ ID NO: 804 - protein, 738 aa, unidentified
  source 1..738: note = Adeno-associated virus
MAADGYLPDWLEDNLSEGIREWWDLKPGAPKPKANQQKQDDGRGLVLPGYKYLGPFNGLDKGEPVNAADAAALEHDKAYDQQLKAGDNPYLRYNHADAEFQERLQEDTSFGGNLGRAVFQAKKRVLEPLGLVEEAAKTAPGKKRPVEPSPQRSPDSSTGIGKKGQRPAKKRLNFGQTGDSESVPDPQPIGEPPAGPSGLGSGTMAAGGGAPMADNNEGADGVGSSSGNWHCDSTWLGDRVITTSTRTWALPTYNNHLYKQISNGTSGGSTNDNTYFGYSTPWGYFDFNRFHCHFSPRDWQRLINNNWGFRPKRLSFKPFNIQVKEVTQNEGTKTIANNLTSTIQVFTDSEYQLPYVLGSAHQGCLPPFPADVFMIPQYGYLTLNNGSQAVGRSSFYCLEYFPSQMLRTGNNFEFSYTFEDVPFHSSYAHSQSLDRLMNPLIDQYLHYLSRTQSTGGTQGTQQLLFSQAGPANMSAQAKNWLPGPCYRQQRVSTTLSQNNNSNFAWTGATKYHLNGRDSLVNPGVAMATHKDDEERFFPSSGVLMFGKQGAGRDNVDYSSVMLTSEEEIKTTNPVATEQYGVVADNLQQTNTGPIVGNVNSQGALPGMVWQNRDVYLQGPIWAKIPHTDGNFHPSPLMGGFGLKHPPPQILIKNTPVPADPPTTFSQAKLASFITQYSTGQVSVEIEWELQKENSKRWNPEIQYTSNYYKSTNVDFAVNTEGTYSEPRPIGTRYLTRNL

SEQ ID NO: 805 - DNA, 2217 bp, unidentified
  source 1..2217: mol_type = unassigned DNA; note = Adeno-associated virus
atggctgctgacggttatcttccagattggctcgaggacaacctctctgagggcattcgcgagtggtgggacctgaaacctggagcccccaagcccaaggccaaccagcagaagcaggacgacggccggggtctggtgcttcctggctacaagtacctcggacccttcaacggactcgacaagggggagcccgtcaacgcggcggacgcagcggccctcgagcacgacaaggcctacgaccagcagctcaaagcgggtgacaatccgtacctgcggtataaccacgccgacgccgagtttcaggagcgtctgcaagaagatacgtcttttgggggcaacctcgggcgagcagtcttccaggccaagaagcgggttctcgaacctctcggtctggttgaggaagctgctaagacggctcctggaaagaagagaccggtagaaccgtcacctcagcgttcccccgactcctccacgggcatcggcaagaaaggccagcagcccgctaaaaagagactgaactttggtcagactggcgactcagagtcagtccccgaccctcaaccaatcggagaaccaccagcaggcccctctggtctgggatctggtacaatggctgcaggcggtggcgctccaatggcagacaataacgaaggcgccgacggagtgggtagttcctcaggaaattggcattgcgattccacatggctgggcgacagagtcatcaccaccagcacccgaacctgggccctgcccacctacaacaaccacctctacaagcaaatatccaatgggacatcgggaggaagcaccaacgacaacacctacttcggctacagcaccccctgggggtattttgacttcaacagattccactgccacttctcaccacgtgactggcagcgactcatcaacaacaactggggattccggccaaaaagactcagcttcaagctcttcaacatccaggtcaaggaggtcacgcagaatgaaggcaccaagaccatcgccaataaccttaccagcacgattcaggtatttacggactcggaataccagctgccgtacgtcctcggctccgcgcaccagggctgcctgcctccgttcccggcggacgtcttcatgattccccagtacggctaccttacactgaacaatggaagtcaagccgtaggccgttcctccttctactgcctggaatattttccatctcaaatgctgcgaactggaaacaattttgaattcagctacaccttcgaggacgtgcctttccacagcagctacgcacacagccagagcttggaccgactgatgaatcctctcatcgaccagtacctgtactacttatccagaactcagtccacaggaggaactcaaggtacccagcaattgttattttctcaagctgggcctgcaaacatgtcggctcaggctaagaactggctacctggaccttgctaccggcagcagcgagtctctacgacactgtcgcaaaacaacaacagcaactttgcttggactggtgccaccaaatatcacctgaacggaagagactctttggtaaatcccggtgtcgccatggcaacccacaaggacgacgaggaacgcttcttcccgtcgagtggagtcctgatgtttggaaaacagggtgctggaagagacaatgtggactacagcagcgttatgctaaccagcgaagaagaaattaaaaccactaaccctgtagccacagaacaatacggtgtggtggctgataacttgcagcaaaccaatacggggcctattgtgggaaatgtcaacagccaaggagccttacctggcatggtctggcagaaccgagacgtgtacctgcagggtcccatctgggccaagattcctcacacggacggcaacttccacccttcaccgctaatgggaggatttggactgaagcacccacctcctcagatcctgatcaagaacacgccggtacctgcggatcctccaacaacgttcagccaggcgaaattggcttccttcattacgcagtacagcaccggacaggtcagcgtggaaatcgagtgggagctgcagaaggagaacagcaaacgctggaacccagagattcagtacacttcaaactactacaaatctacaaatgtggactttgctgtcaatacagagggaacttattctgagcctcgccccattggtactcgttacctcacccgtaatctgtaa

SEQ ID NO: 806 - protein, 738 aa, unidentified; identical to SEQ ID NO: 458
  source 1..738: note = Adeno-associated virus

SEQ ID NO: 807 - protein, 738 aa, unidentified
  source 1..738: note = Adeno-associated virus
MAADGYLPDWLEDNLSEGIREWWDLKPGAPKPKANQQKQDDGRGLVLPGYKYLGPFNGLDKGEPVNAADAAALEHDKAYDQQLKAGDNPYLRYNHADAEFQERLQEDTSFGGNLGRAVFQAKKRVLEPLGLVEEAAKTAPGKKRPVEPSPQRSPDSSTGIGKKGQQPAKKRLNFGQTGDSESVPDPQPIGEPPAGPSGLGSGTMAAGGGAPMADNNEGADGVGSSSGNWHCDSTWLGDRVITTSTRTWALPTYNNHLYKQISNGTSGGSTNDNTYFGYSTPWGYFDFNRFHCHFSPRDWQRLINNNWGFRPKRLSFKLFNIQVKEVTQDEGTKTIANNLTSTIQVFTDSEYQLPYVLGSAHQGCLPPFPADVFMIPQYGYLTLNNGSQAVGRSSFYCLEYFPSQMLRTGNNFEFSYTFEDVPFHSSYAHSQSLDRLMNPLIDQYLYYLSRTQSTGGTQGTQQLLFSQAGPANMSARAKNWLPGPCYRQQRVSTTLSQNNNSNFAWTGATKYHLNGRDSLVNPGVAMATHKDDEERFFPSSGVLMFGKQGAGRDNVDYSSVMLTSEEEIKTTNPVATEQYGVVADNLQQANTGPIVGNVNSQGALPGMVWQNRDVYLQGPIWAKIPHTDGNFHPSPLMGGFGLKHPPPQILIKNTPVPADPPTTFSQAKLASFITQYSTGQVSVEIEWELQKENSKRWNPEIQYTSNYYKSTNVDFAVNSEGTYSEPRPIGTRYLTRNL

SEQ ID NO: 808 - DNA, 2217 bp, unidentified
  source 1..2217: mol_type = unassigned DNA; note = Adeno-associated virus
atggctgctgacggttatcttccagattggctcgaggacaacctctctgagggcattcgcgagtggtgggacctgaaacctggagcccccaagcccaaggccaaccagcagaagcaggacgacggccggggtctggtgcttcctggctacaagtacctcggacccttcaacggactcgacaagggggagcccgtcaacgcggcggacgcagcggccctcgagcacgacaaggcctacgaccagcagctcaaagcgggtgacaatccgtacctgcggtataaccacgccgacgccgagtttcaggagcgtctgcaagaagatacgtcttttgggggcaacctcgggcgagcagtcttccaggccaagaagcgggttctcgaacctctcggtctggttgaggaagctgctaagacggctcctggaaagaagagaccggtagaaccgtcacctcagcgttcccccgactcctccacgggcatcggcaagaaaggccagcagcccgctaaaaagagactgaactttggtcagactggcgactcagagtcagtccccgaccctcaaccaatcggagaaccaccagcaggcccctctggtctgggatctggtacaatggctgcaggcggtggcgctccaatggcagacaataacgaaggcgccgacggagtgggtagttcctcaggaaattggcattgcgattccacatggctgggcgacagagtcatcaccaccagcacccgaacctgggccctgcccacctacaacaaccacctctacaagcaaatatccaatgggacatcgggaggaagcaccaacgacaacacctacttcggctacagcaccccctgggggtattttgacttcaacagattccactgccacttctcaccacgtgactggcagcgactcatcaacaacaactggggattccggccaaaaagactcagcttcaagctcttcaacatccaggtcaaggaggtcacgcaggatgaaggcaccaagaccatcgccaataaccttaccagcacgattcaggtatttacggactcggaataccagctgccgtacgtcctcggctccgcgcaccagggctgcctgcctccgttcccggcggacgtcttcatgattccccagtacggctaccttacactgaacaatggaagtcaagccgtaggccgttcctccttctactgcctggaatattttccatctcaaatgctgcgaactggaaacaattttgaattcagctacaccttcgaggacgtgcctttccacagcagctacgcacacagccagagcttggaccgactgatgaatcctctcatcgaccagtacctgtactacttatccagaactcagtccacaggaggaactcaaggtacccagcaattgttattttctcaagctgggcctgcaaacatgtcggctcgggctaagaactggctacctggaccttgctaccggcagcagcgagtctctacgacactgtcgcaaaacaacaacagcaactttgcttggactggtgccaccaaatatcacctgaacggaagagactctttggtaaatcccggtgttgctatggcaacgcataaggacgacgaggaacgtttctttccatcgagcggagtcctgatgtttggaaaacagggtgctggaagagacaatgtggactatagcagcgttatgctaaccagcgaggaagaaattaaaaccactaaccctgtagccacagaacaatacggtgtggtggctgacaacttgcagcaagccaatacagggcctattgtgggaaatgtcaacagccaaggagccttacctggcatggtctggcagaaccgagacgtgtacctgcagggtcccatctgggccaaaattcctcacacggacggcaattttcacccgtctcctctgatgggcggctttggactgaagcacccacctccccagatcctgatcaagaatacgccggtacctgcggatcctccaacgacgttcagccaggcaaaattggcttccttcatcacgcagtacagcaccggccaggtcagcgtggagatcgagtgggagctgcagaaggagaacagcaagcgatggaacccagaaattcagtacacttccaactactacaaatctacaaatgtggactttgctgtcaattctgagggtacatattcagagcctcgccccattggtactcgttatctgacacgtaatctgtaa

SEQ ID NO: 809 - DNA, 2211 bp, unidentified
  source 1..2211: mol_type = unassigned DNA; note = Adeno-associated virus
atggctgccgatggttatcttccagattggctcgaggacaacctctctgagggcattcgcgagtggtgggacttgaaacctggagccccgaaacccaaagccaaccagcaaaagcaggacgacggccggggcctggtgcttcctggctacaagtacctcggacccttcaacggactcgacaagggggagcccgtcaacgcggcggacgcagcggccctcgagcacgacaaggcctacgaccagcagctcgaagcgggtgacaatccgtacctgcggtataaccacgccgacgccgagtttcaggagcgtctgcaagaagatacgtcttttgggggcaacctcgggcgagcagtcttccaggccaagaagcgggttctcgaacctctcggtctggttgaggaaggcgctaagacggctcctggaaagaagagaccagtagagcagtcaccccaagaaccagactcctcctcgggcatcggcaagaaaggccaacagcccgccagaaaaagactcaattttggccagactggcgactcagagtcagttccagaccctcaacctctcggagaacctccagcagcgccctctggtgtgggacctaatacaatggctgcaggcggtggcgcaccaatggcagacaataacgaaggcgccgacggagtgggtagttcctcgggaaattggcattgcgattccacatggctgggcgacagagtcatcaccaccagcacccgaacctgggccctgcccacctacaacaaccacctctacaagcaaatctccaacgggacatcgggaggagccaccaacgacaacacctacttcggctacagcaccccctgggggtattttgactttaacagattccactgccacttttcaccacgtgactggcagcgactcatcaacaacaactggggattccggcccaagagactcagcttcaagctcttcaacatccaggtcaaggaggtcacgcagaatgaaggcaccaagaccatcgccaataacctcaccagcaccatccaggtgtttacggactcggagtaccagctgccgtacgttctcggctctgcccaccagggctgcctgcctccgttcccggcggacgtgttcatgattccccagtacggctacctaacactcaacaacggtagtcaggccgtgggacgctcctccttctactgcctggaatactttccttcgcagatgctgagaaccggcaacaacttccagtttacttacaccttcgaggacgtgcctttccacagcagctacgcccacagccagagcttggaccggctgatgaatcctctgattgaccagtacctgtactacttgtctcggactcaaacaacaggaggcacggcaaatacgcagactctgggcttcagccaaggtgggcctaatacaatggccaatcaggcaaagaactggctgccaggaccctgttaccgccaacaacgcgtctcaacgacaaccgggcaaaacaacaatagcaactttgcctggactgctgggaccaaataccatctgaatggaagaaattcattggctaatcctggcatcgctatggcaacacacaaagacgacgaggagcgttttttcccagtaacgggatcctgtttttggcaacaaaatgctgccagagacaatgcggattacagcgatgtcatgctcaccagcgaggaagaaatcaaaaccactaaccctgtggctacagaggaatacggtatcgtggcagataacttgcagcagcaaaacacggctcctcaaattggaactgtcaacagccagggggccttacccggtatggtctggcagaaccgggacgtgtacctgcagggtcccatctgggccaagattcctcacacggacggcaacttccacccgtctccgctgatgggcggctttggcctgaaacatcctccgcctcagatcctgatcaagaacacgcctgtacctgcggatcctccgaccaccttcaaccagtcaaagctgaactctttcatcacgcaatacagcaccggacaggtcagcgtggaaattgaatgggagctacagaaggaaaacagcaagcgctggaaccccgagatccagtacacctccaactactacaaatctacaagtgtggactttgctgttaatacagaaggcgtgtactctgaaccccgccccattggcacccgttacctcacccgtaatctgtaa

SEQ ID NO: 810 - protein, 736 aa, unidentified
  source 1..736: note = Adeno-associated virus
MAADGYLPDWLEDNLSEGIREWWDLKPGAPKPKANQQKQDDGRGLVLPGYKYLGPFNGLDKGEPVNAADAAALEHDKAYDQQLEAGDNPYLRYNHADAEFQERLQEDTSFGGNLGRAVFQAKKRVLEPLGLVEEGAKTAPGKKRPVEQSPQEPDSSSGIGKKGQQPARKRLNFGQTGDSESVPDPQPLGEPPAAPSGVGPNTMAAGGGAPMADNNEGADGVGSSSGNWHCDSTWLGDRVITTSTRTWALPTYNNHLYKQISNGTSGGATNDNTYFGYSTPWGYFDFNRFHCHFSPRDWQRLINNNWGFRPKRLSFKLFNIQVKEVTQNEGTKTIANNLTSTIQVFTDSEYQLPYVLGSAHQGCLPPFPADVFMIPQYGYLTLNNGSQAVGRSSFYCLEYFPSQMLRTGNNFQFTYTFEDVPFHSSYAHSQSLDRLMNPLIDQYLYYLSRTQTTGGTANTQTLGFSQGGPNTMANQAKNWLPGPCYRQQRVSTTTGQNNNSNFAWTAGTKYHLNGRNSLANPGIAMATHKDDEERFFPVTGSCFWQQNAARDNADYSDVMLTSEEEIKTTNPVATEEYGIVADNLQQQNTAPQIGTVNSQGALPGMVWQNRDVYLQGPIWAKIPHTDGNFHPSPLMGGFGLKHPPPQILIKNTPVPADPPTTFNQSKLNSFITQYSTGQVSVEIEWELQKENSKRWNPEIQYTSNYYKSTSVDFAVNTEGVYSEPRPIGTRYLTRNL

SEQ ID NO: 811 - DNA, 2214 bp, unidentified
  source 1..2214: mol_type = unassigned DNA; note = Adeno-associated virus
atggctgctgacggttatcttccagattggctcgaggacaacctctctgagggcattcgcgagtggtgggacctgaaacctggagcccccaagcccaaggccaaccagcagaagcaggacgacggccggggtctggtgcttcctggctacaagtacctcggacccttcaacggactcgacaagggggagcccgtcagcgcggcggacgcagcggccctcgagcacgacaaggcctgcgaccagcggctcaaagcgggtgacaatccgtacctgcggtataaccacgccgacgccgagtttcaggagcgtctgcaagaagatacgtcttttgggggcaacctcgggcgagcagtcttccaggccaagaagcgggttctcgaacctctcggtctggttgaggaagctgctaagacggctcctggaaagaagggaccggtagaaccgtcacctcagcgttcccccgactcctccacgggcatcggcaagaaaggccagcagcccgctagaaagagactgaactttgggcagactggcgactcagagtcagtccccgaccctcaaccaatcggagaaccaccagcaggcccctctggtctgggatctggtacaatggctgcaggcggtggcgcaccaatggctgacaataacgagggcgccgacggagtgggtaatgcctcaggaaattggcattgcgattccacatggctgggcgacagagtcatcaccaccagcacccgaacctgggctttgcccacctacaacaatcacctctacaagcaaatctccagtcagtcagcaggtagcaccaacgacaacgtctacttcggctacagcaccccctgggggtattttgacttcaacagattccactgtcacttctcaccacgtgactggcagcggctcatcaacaacaactggggattccggcccaagaagctcaacttcaagctgttcaacatccaggtcaaggaggtcacaacgaatgacggcgtcacgaccatcgccaataaccttaccagcacggttcaggtcttttcggactcggaataccagctgccctacgtcctcggctccgcacaccagggctgcctgcctccgttcccggcggacgtcttcatgattccccagtacggctacctgactctgaacaatggcagccaatcggtgggtcgttcctctttctactgcctggaatatttcccttctcaaatgctgagaacgggcaacaacttcaccttcagctacaccttcgaggacgttcccttccacagcagctacgcacacagccagagcctggaccggctgatgaatcctcttatcgaccagtacctgtattacctggccagaacacagagcaacgcaggaggcacagctggcaatcgggaactgcagttttatcagggcgggcctaccaccatggccgaacaagccaaaaactggctgcctggaccttgcttccggcaacaaagagtctccaagacgctggatcaaaacaacaacagcaactttgcttggactggtgccaccaaataccatctaaatggaagaaattcattggttaatcccggtgtcgccatggcaacccacaaggacgacgaggaacgcttcttcccttcgagcggagtcctgatttttggaaaaactggagcagctaataagactacactggaaaatgtgttaatgacaaatgaagaggaaattcgtcctaccaacccggtagccaccgaggaatacgggactgttagcagcaacctgcaggcggctaacactgcagcccagacacaagttgtcaacaaccagggagccttacctggtatggtctggcagaaccgggacgtgtacctgcagggtcccatctgggccaagattcctcacacggacggcaactttcacccgtctccgctgatgggcggctttggactgaagcatccgcctcctcagatcctgatcaaaaacactcctgttcctgctaatcccccggaggtgtttacgcctgccaagtttgcttctttcatcacacagtacagcaccggccaggtcagcgtggagatcgagtgggagctgcagaaggagaacagcaagcgctggaacccagagattcagtatacctccaattttgacgaacagactggtgtggactttgccgttgacagccagggtgtttattctgagcctcgccccattggtactcgttacctcacccgtaatctgtaa

SEQ ID NO: 812 - protein, 737 aa, unidentified
  source 1..737: note = Adeno-associated virus
MAADGYLPDWLEDNLSEGIREWWDLKPGAPKPKANQQKQDDGRGLVLPGYKYLGPFNGLDKGEPVSAADAAALEHDKACDQRLKAGDNPYLRYNHADAEFQERLQEDTSFGGNLGRAVFQAKKRVLEPLGLVEEAAKTAPGKKGPVEPSPQRSPDSSTGIGKKGQQPARKRLNFGQTGDSESVPDPQPIGEPPAGPSGLGSGTMAAGGGAPMADNNEGADGVGNASGNWHCDSTWLGDRVITTSTRTWALPTYNNHLYKQISSQSAGSTNDNVYFGYSTPWGYFDFNRFHCHFSPRDWQRLINNNWGFRPKKLNFKLFNIQVKEVTTNDGVTTIANNLTSTVQVFSDSEYQLPYVLGSAHQGCLPPFPADVFMIPQYGYLTLNNGSQSVGRSSFYCLEYFPSQMLRTGNNFTFSYTFEDVPFHSSYAHSQSLDRLMNPLIDQYLYYLARTQSNAGGTAGNRELQFYQGGPTTMAEQAKNWLPGPCFRQQRVSKTLDQNNNSNFAWTGATKYHLNGRNSLVNPGVAMATHKDDEERFFPSSGVLIFGKTGAANKTTLENVLMTNEEEIRPTNPVATEEYGTVSSNLQAANTAAQTQVVNNQGALPGMVWQNRDVYLQGPIWAKIPHTDGNFHPSPLMGGFGLKHPPPQILIKNTPVPANPPEVFTPAKFASFITQYSTGQVSVEIEWELQKENSKRWNPEIQYTSNFDEQTGVDFAVDSQGVYSEPRPIGTRYLTRNL

SEQ ID NO: 813 - DNA, 2214 bp, unidentified
  source 1..2214: mol_type = unassigned DNA; note = Adeno-associated virus
atggctgccgatggttatcttccagattggctcgaggacaacctctctgagggcattcgcgagtggtgggacctgaaacctggagccccgaaacccaaagccaaccagcaaaagcaggacgacggccggggtctggtgcttcctggctacaagtacctcggacccttcaacggactcgacaagggggagcccgtcaacgcggcggacgcagcggccctcgagcacgacaaggcctacgaccagcagctcaaagcgggtgacaatccgtacctgcggtataaccacgccgacgccgagtttcaggagcgtctgcaagaagatacgtcttttgggggcaacctcgggcgagcagtcttccaggccaagaagcgggttctcgaacctctcggtctggttgaggaagctgctaagacggctcctggaaagaagagaccggtagaaccgtcacctcagcgttcccccgactcctccacgggcatcggcaagaaaggccagcagcccgctagaaagagactgaactttgggcagactggcgactcagagtcagtccccgaccctcaaccaatcggagaaccaccagcaggcccctctggtctgggatctggtacaatggctgcaggcggtggcgctccaatggcagacaataacgaaggcgccgacggagtgggtaatgcctcaggaaattggcattgcgattccacatggctgggcgacagagtcatcaccaccagcacccgaacctgggctttgcccacctacaacaaccacctctacaagcaaatctccagtcagtcagcaggtagcaccaacgacaacgtctacttcggctacagcaccccctgggggtattttgacttcaacagattccactgtcacttctcaccacgtgactggcagcggctcatcaacaacaactggggattccggcccaagaagctcaacttcaagctgttcaacatccaggtcaaggaggtcacaacgaatgacggcgtcacgaccatcgccaataaccttaccagcacggttcaggtcttttcggactcggaataccagctgccctacgtcctcggctccgcacaccagggctgcctgcctccgttcccggcggacgtcttcatgattcctcagtacggctacctgactctcaacaacggtagtcaggccgtgggacgttcctccttctactgcctggagtacttcccctctcagatgctgagaacgggcaacaacttttccttcagctacactttcgaggacgtgcctttccacagcagctacgcgcacagccagagtttggacaggctgatgaatcctctcatcgaccagtacctgtactacctgtcaagaacccagtctacgggaggcacagcgggaacccagcagttgctgttttctcaggccgggcctagcaacatgtcgactcaggccagaaactggctgcctggaccctgctacagacagcagcgcgtctccacgacactgtcgcaaaacaacaacagcaactttgcctggactggtgccaccaagtatcatctgaacggcagagactctctggtgaatccgggcgtcgccatggcaaccaacaaggacgacgaggaccgcttcttcccatccagcggcatcctcatgtttggcaagcagggagctggaaaagacaacgtggactatagcaacgtgatgctaaccagcgaggaagaaatcaagaccaccaaccccgtggccacagaacagtatggcgtggtggctgataacctacagcagcaaaacaccgctcctattgtgggggccgtcaacagccagggagccttacctggcatggtctggcagaaccgggacgtgtacctgcagggtcctatttgggccaagattcctcacacagatggcaactttcacccgtctcctttaatgggcggctttggacttaaacatccgcctcctcagatccttatcaaaaacactcctgttcctgcggatcctccaacagcgttcaaccaggccaagctgaattctttcatcacgcagtacagcaccggacaagtcagcgtggagatcgagtgggagctgcagaaggagaacagcaagcgctggaacccagagattcagtatacttccaactactacaaatctacaaatgtggactttgctgttaatactgagggtgcttactctgagcctcgccccattggcactcgttacctcacccgtaatctgtaa

SEQ ID NO: 814 - protein, 737 aa, unidentified
  source 1..737: note = Adeno-associated virus
MAADGYLPDWLEDNLSEGIREWWDLKPGAPKPKANQQKQDDGRGLVLPGYKYLGPFNGLDKGEPVNAADAAALEHDKAYDQQLKAGDNPYLRYNHADAEFQERLQEDTSFGGNLGRAVFQAKKRVLEPLGLVEEAAKTAPGKKRPVEPSPQRSPDSSTGIGKKGQQPARKRLNFGQTGDSESVPDPQPIGEPPAGPSGLGSGTMAAGGGAPMADNNEGADGVGNASGNWHCDSTWLGDRVITTSTRTWALPTYNNHLYKQISSQSAGSTNDNVYFGYSTPWGYFDFNRFHCHFSPRDWQRLINNNWGFRPKKLNFKLFNIQVKEVTTNDGVTTIANNLTSTVQVFSDSEYQLPYVLGSAHQGCLPPFPADVFMIPQYGYLTLNNGSQAVGRSSFYCLEYFPSQMLRTGNNFSFSYTFEDVPFHSSYAHSQSLDRLMNPLIDQYLYYLSRTQSTGGTAGTQQLLFSQAGPSNMSTQARNWLPGPCYRQQRVSTTLSQNNNSNFAWTGATKYHLNGRDSLVNPGVAMATNKDDEDRFFPSSGILMFGKQGAGKDNVDYSNVMLTSEEEIKTTNPVATEQYGVVADNLQQQNTAPIVGAVNSQGALPGMVWQNRDVYLQGPIWAKIPHTDGNFHPSPLMGGFGLKHPPPQILIKNTPVPADPPTAFNQAKLNSFITQYSTGQVSVEIEWELQKENSKRWNPEIQYTSNYYKSTNVDFAVNTEGAYSEPRPIGTRYLTRNL

SEQ ID NO: 815 - DNA, 2217 bp, unidentified
  source 1..2217: mol_type = unassigned DNA; note = Adeno-associated virus
atggctgccgatggttatcttccagattggctcgaggacaacctctctgagggcattcgcgagtggtgggacctgaaacctggagccccgaaacccaaagccaaccagcaaaagcaggacgacggccggggtctggtgcttcctggctacaagtacctcggacccttcaacggactcgacaagggggagcccgtcaacgcggcggacgcagcggccctcgagcacgacaaggcctacgaccagcagctcaaagcgggtgacaatccgtacctgcggtataatcacgccgacgccgagtttcaggagcgtctgcaagaagatacgtcttttgggggcaacctcgggcgagcagtcttccaggccaagaagcgggttctcgaacctctcggtctggttgaggaaggcgctaagacggctcctggaaagaagagaccggtagagccgtcaccacagcgttcccccgactcctccacgggcatcggcaagaaaggccagcagcccgccagaaagagactcaatttcggtcagactggcgactcagagtcagtccccgaccctcaacctatcggagaacctccagcagcgccctctagtgtgggatctggtacaatggctgcaggcggtggcgcaccaatggcagacaataacgaaggtgccgacggagtgggtagttcctcgggaaattggcattgcgattccacatggctgggcgacagagtcatcaccaccagcacccgaacctgggccctgcccacctacaacaaccacctctacaagcaaatctccaacgggacctcgggaggcagcaccaacgacaacacctactttggctacagcaccccctgggggtattttgactttaacagattccactgccacttctcaccacgtgactggcagcgactcatcaacaacaactggggattccggcccaagagactcagcttcaagctcttcaacatccaggtcaaagaggtcacgcagaatgaaggcaccaagaccatcgccaataacctcaccagcaccatccaggtgtttacggactcggaataccagctgccgtacgtcctcggctctgcccaccagggctgcctgcctccgttcccggcggacgtcttcatgattcctcagtacggctacctgactctcaacaacggtagtcaggccgtgggacgttcctccttctactgcctggagtacttcccctctcagatgctgagaacgggcaacaacttttccttcagctacactttcgaggacgtgcctttccacagcagctacgcgcacagccagagtttggacaggctgatgaatcctctcatcgaccagtacctgtactacctgtcaagaacccagtctacgggaggcacagcgggaacccagcagttgctgttttctcaggccgggcctagcaacatgtcggctcaggccagaaactggctgcctggaccctgctacagacagcagcgcgtctccacgacactgtcgcaaaacaacaacagcaactttgcctggactggtgccaccaagtatcatctgaacggcagagactctctggtgaatccgggcgtcgccatggcaaccaacaaggacgacgaggaccgcttcttcccatccagcggcatcctcatgtttggcaagcagggagctggaaaagacaacgtggactatagcaacgtgatgctaaccagcgaggaagaaatcaaggccaccaaccccgtggccacagaacagtatggcgtggtggctgataacctacagcagcaaaacaccgctcctattgtgggggccgtcaacagccagggagccttacctggcatggtctggcagaaccgggacgtgtacctgcagggtcctatttgggccaagattcctcacacagatggcaactttcacccgtctcctttaatgggcggctttggacttaaacatccgcctcctcagatcctcatcaaaaacactcctgttcctgcggatcctccaacagcgttcaaccaggccaagctgaattctttcatcacgcagtacagcaccggacaagtcagcgtggagatcgagtgggagctgcagaaggagaacagcaagcgctggaacccagagattcagtatacttccaactactacaaatctacaaatgtggactttgctgttaatactgagggtgtttactctgagcctcgccccattggcactcgttacctcacccgtaatctgtaa

SEQ ID NO: 816 - protein, 738 aa, unidentified
  source 1..738: note = Adeno-associated virus
MAADGYLPDWLEDNLSEGIREWWDLKPGAPKPKANQQKQDDGRGLVLPGYKYLGPFNGLDKGEPVNAADAAALEHDKAYDQQLKAGDNPYLRYNHADAEFQERLQEDTSFGGNLGRAVFQAKKRVLEPLGLVEEGAKTAPGKKRPVEPSPQRSPDSSTGIGKKGQQPARKRLNFGQTGDSESVPDPQPIGEPPAAPSSVGSGTMAAGGGAPMADNNEGADGVGSSSGNWHCDSTWLGDRVITTSTRTWALPTYNNHLYKQISNGTSGGSTNDNTYFGYSTPWGYFDFNRFHCHFSPRDWQRLINNNWGFRPKRLSFKLFNIQVKEVTQNEGTKTIANNLTSTIQVFTDSEYQLPYVLGSAHQGCLPPFPADVFMIPQYGYLTLNNGSQAVGRSSFYCLEYFPSQMLRTGNNFSFSYTFEDVPFHSSYAHSQSLDRLMNPLIDQYLYYLSRTQSTGGTAGTQQLLFSQAGPSNMSAQARNWLPGPCYRQQRVSTTLSQNNNSNFAWTGATKYHLNGRDSLVNPGVAMATNKDDEDRFFPSSGILMFGKQGAGKDNVDYSNVMLTSEEEIKATNPVATEQYGVVADNLQQQNTAPIVGAVNSQGALPGMVWQNRDVYLQGPIWAKIPHTDGNFHPSPLMGGFGLKHPPPQILIKNTPVPADPPTAFNQAKLNSFITQYSTGQVSVEIEWELQKENSKRWNPEIQYTSNYYKSTNVDFAVNTEGVYSEPRPIGTRYLTRNL

SEQ ID NO: 817 - DNA, 2217 bp, unidentified
  source 1..2217: mol_type = unassigned DNA; note = Adeno-associated virus
atggctgccgatggttatcttccagattggctcgaggacaacctctctgagggcattcgcgagtggtgggacctgaaacctggagccccgaaacccaaagccaaccagcaaaagcaggacgacggccggggtctggtgcttcctggctacaagcacctcggacccttcaacggactcgacaagggggagcccgtcaacgcggcggacgcagcggccctcgagcacgacaaggcctacgaccagcagctcaaagcgggtgacaatccgtacctgcggtataatcacgctgacgccgagtttcaggagcgtctgcaagaagatacgtcttttgggggcaacctcgggcgagcagtcttccaggccaagaagcgggttctcgaacctctcggtctggttgaggaaggcgctaagacggctcctggaaagaagagaccggtagagccgtcaccacagcgttcccccgactcctccacgggcatcggcaagaaaggccagcagcccgccagaaagagactcaatttcggtcagactggcgactcagagtcagtccccgaccctcaacctatcggagaacctccagcagcgccctctagtgtgggatctggtacaatggctgcaggcggtggcgcaccaatggcagacaataacgaaggtgccgacggagtgggtagttcctcgggaaattggcattgcgattccacatggctgggcgacagagtcatcaccaccagcacccgaacctgggccctgcccacctacaacaaccacctctacaagcaaatctccaacgggacctcgggaggcagcaccaacgacaacacctactttggctacagcaccccctgggggtattttgactttaacagattccactgccacttctcaccacgtgactggcagcgactcatcaacaacaactggggattccggcccaagagactcagcttcaagctcttcaacatccaggtcaaagaggtcacgcagaatgaaggcaccaagaccatcgccaataaccttaccagcacggttcaggtcttttcggactcggaataccagctgccctacgtcctcggctccgcacaccagggctgcctgcctccgttcccggcggacgtcttcatgattccccagtacggctacctgactctgaacaatggcagccaatcggtgggtcgttcctctttctactgcctggaatatttcccttctcaaatgctgagaacgggcaacaacttcaccttcagctacaccttcgaggacgttcccttccacagcagctacgcacacagccagagcctggaccggctgatgaatcctcttatcgaccagtacctgtattacctggccagaacacagagcaacgcaggaggcacagctggcaatcgggaactgcagttttatcagggcgggcctaccaccatggccgaacaagccaaaaactggctgcctggaccttgcttccggcaacaaagagtctccaagacgctggatcaaaacaacaacagcaactttgcttggactggtgccaccaaataccatctaaatggaagaaattcattggttaatcccggtgtcgccatggcaacccacaaggacgacgaggaacgcttcttcccttcgagcggagtcctgatttttggaaaaactggagcagctaataagactacactggaaaatgtgttaatgacaaatgaagaggaaattcgtcctaccaacccggtagccaccgaggaatacgggactgttagcagcaacctgcaggcggctaacactgcagcccagacacaagttgtcaacaaccagggagccttacctggtatggtctggcagaaccgggacgtgtacctgcagggtcccatctgggccaagattcctcacacggacggcaactttcacccgtctccgctgatgggcggctttggactgaagcatccgcctcctcagatcctgatcaaaaacactcctgttcctgctaatcccccggaggtgtttacgcctgccaagtttgcttctttcatcacacagtacagcaccggccaggtcagcgtggagatcgagtgggagctgcagaaggagaacagcaagcgctggaacccagagattcagtatacctccaattttgacaaacagactggtgtggactttgccgttgacagccagggtgtttattctgagcctcgccccattggtactcgttacctcacccgtaatctgtaa

SEQ ID NO: 818 - protein, 738 aa, unidentified
  source 1..738: note = Adeno-associated virus
MAADGYLPDWLEDNLSEGIREWWDLKPGAPKPKANQQKQDDGRGLVLPGYKHLGPFNGLDKGEPVNAADAAALEHDKAYDQQLKAGDNPYLRYNHADAEFQERLQEDTSFGGNLGRAVFQAKKRVLEPLGLVEEGAKTAPGKKRPVEPSPQRSPDSSTGIGKKGQQPARKRLNFGQTGDSESVPDPQPIGEPPAAPSSVGSGTMAAGGGAPMADNNEGADGVGSSSGNWHCDSTWLGDRVITTSTRTWALPTYNNHLYKQISNGTSGGSTNDNTYFGYSTPWGYFDFNRFHCHFSPRDWQRLINNNWGFRPKRLSFKLFNIQVKEVTQNEGTKTIANNLTSTVQVFSDSEYQLPYVLGSAHQGCLPPFPADVFMIPQYGYLTLNNGSQSVGRSSFYCLEYFPSQMLRTGNNFTFSYTFEDVPFHSSYAHSQSLDRLMNPLIDQYLYYLARTQSNAGGTAGNRELQFYQGGPTTMAEQAKNWLPGPCFRQQRVSKTLDQNNNSNFAWTGATKYHLNGRNSLVNPGVAMATHKDDEERFFPSSGVLIFGKTGAANKTTLENVLMTNEEEIRPTNPVATEEYGTVSSNLQAANTAAQTQVVNNQGALPGMVWQNRDVYLQGPIWAKIPHTDGNFHPSPLMGGFGLKHPPPQILIKNTPVPANPPEVFTPAKFASFITQYSTGQVSVEIEWELQKENSKRWNPEIQYTSNFDKQTGVDFAVDSQGVYSEPRPIGTRYLTRNL

SEQ ID NO: 819 - protein, 737 aa, unidentified
  source 1..737: note = Adeno-associated virus
MAADGYLPDWLEDNLSEGIREWWDLKPGAPKPKANQQKQDDGRGLVLPGYKYLGPFNGLDKGEPVNAADAAALEHDKAYDQQLKAGDNPYLRYNHADAEFQERLQEDTSFGGNLGRAVFQAKKRVLEPLGLVEEAAKTAPGKKRPVEPSPQRSPDSSTGIGKKGQQPARKRLNFGQTGDSESVPDPQPIGEPPAGPSGLGSGTMAAGGGAPMADNNKGADGVGNASGNWHCDSTWLGDRVITTSTRTWALPTYNNHLYKQISSQSAGSTNDNVYFGYSTPWGYFDFNRFHCHFSPRDWQRLINSNWGFRPKKLNFKLFNIQVKEVTTNDGVTTIANNLTSTVQVFSDSEYQLPYVLGSAHQGCLPPFPADVFMIPQYGYLTLNNGSQSVGRSSFYCLEYFPSQMLRTGNNFTFSYTFEDVPFHSSYAHSQSLDRLMNPLIDQYLYYLARTQSNAGGTAGNRELQFYQGGPTTMAEQAKNWLPGPCFRQQRVSKTLDQNNNSNFAWTGATKYHLNGRNSLVNPGVAMATHKDDEERFFPSSGVLIFGKTGAANKTTLENVLMTNEEEIRPTNPVATEEYGTVSSNLQAANTAAQTQVVNNQGALPGMVWQNRDVYLQGPIWAKIPHTDGNFHPSPLMGGFGLKHPPPQILIKNTPVPANPPEVFTPAKFASFITQYSTGQVSVEIEWELQKENSKRWNPEIQYTSNFDKQTGVDFAVDSQGVYSEPRPIGTRYLTRNL

SEQ ID NO: 820 - protein, 737 aa, unidentified
  source 1..737: note = Adeno-associated virus
MAADGYLPDWLEDNLSEGIREWWDLKPGAPKPKANQQKQDDGRGLVLPGYKYLGPFNGLDKGEPVNAADAAALEHDKAYDQQLKAGDNPYLRYNHADAEFQERLQEDTSFGGNLGRAVFQAKKRVLEPLGLVEEAAKTAPGKKRPVEPSPQRSPDSSTGIGKKGQQPARKRLNFGQTGDSESVPDPQPIGEPPAGPSGLGSGTMAAGGGAPMADNNEGADGVGNASGNWHCDSTWLGDRVITTSTRTWALPTYNNHLYKQISSQSAGSTNDNVYFGYSTPWGYFDFNRFHCHFSPRDWQRLINSNWGFRPKKLNFKLFNIQVKEVTTNDGVTTIANNLTSTVQVFSDSEYQLPYVLGSAHQGCLPPFPADVFMIPQYGYLTLNNGSQSVGRSSFYCLEYFPSQMLRTGNNFTFSYTFEDVPFHSSYAHSQSLDRLMNPLIDQYLYYLARTQSNAGGTAGNRELQFYQGGPTTMAEQAKNWLPGPCFRQQRVSKTLDQNNNSNFAWTGATKYHLNGRNSLVNPGVAMATHKDDEERFFPSSGVLIFGKTGAANKTTLENVLMTNEEEIRPTNPVATEEYGTVSSNLQAANTAAQTQVVNNQGALPGMVWQNRDVYLQGPIWAKIPHTDGNFHPSPLMGGFGLKHPPPQILIKNTPVPANPPEVFTPAKFASFITQYSTGQVSVEIEWELQKENSKRWNPEIQYTSNFDKQTGVDFAVDSQGVYSEPRPIGTRYLTRNL

SEQ ID NO: 821 - protein, 737 aa, unidentified
  source 1..737: note = Adeno-associated virus
MAADGYLPDWLEDNLSEGIREWWDLKPGAPKPKANQQKQDDGRGLVLPGYKYLGPFNGLDKGEPVNAADAAALEHDKAYDQQLKAGDNPYLRYNHADAEFQERLQEDTSFGGNLGRAVFQAKKRVLEPLGLVEEAAKTAPGKKRPVEPSPQRSPDSSTGIGKKGQQPARKRLNFGQTGDSESVPDPQPIGEPPAGPSGLGSGTMAAGGGAPMADNNEGADGVGNASGNWHCDSTWLGDRVITTSTRTWALPTYNNHLYKQISSQSAGSTNDNVYFGYSTPWGYFDFNRFHCHFSPRDWQRLINNNWGFRPKKLNFKLFNIQVKEVTTNDGVTTIANNLTSTVQVFSDSEYQLPYVLGSAHQGCLPPFPADVFMIPQYGYLTLNNGSQSVGRSSFYCLEYFPSQMLRTGNNFTFSYTFEDVPFHSSYAHSQSLDRLMNPLIDQYLYYLARTQSNAGGTAGNRELQFYQGGPTTMAEQAKNWLPGPCFRQQRVSKTLDQNNNSNFAWTGATKYHLNGRNSLVNPGVAMATHKDDEERFFPSSGVLIFGKTGAANKTTLENVLMTNEEEIRPTNPVATEEYGTVSSNLQAANTAAQTQVVNNQGALPGMVWQNRDVYLQGPIWAKIPHTDGNFHPSPLMGGFGLKHPPPQILIKNTPVPANPPEVFTPAKFASFITQYSTGQVSVEIEWELQKENSKRWNPEIQYTSNFDKQTGVDFAVDSQGVYSEPRPIGTRYLTRNL

SEQ ID NO: 822 - protein, 737 aa, unidentified
  source 1..737: note = Adeno-associated virus
MAADGYLPDWLEDNLSEGIREWWDLKPGAPKPKANQQKQDDGRGLVLPGYKYLGPFNGLDKGEPVNAADAAALEHDKAYDQQLKAGDNPYLRYNHADAEFQERLQEDTSFGGNLGRAVFQAKKRVLEPLGLVEEAAKTAPGKKRPVEPSPQRSPDSSTGIGKKGQQPARKRLNFGQTGDSESVPDPQPIGEPPAGPSGLGSGTMAAGGGAPMADNNKGADGVGNASGNWHCDSTWLGDRVITTSTRTWALPTYNNHLYKQISSQSAGSTNDNVYFGYSTPWGYFDFNRFHCHFSPRDWQRLINNNWGFRPKKLNFKLFNIQVKEVTTNDGVTTIANNLTSTVQVFSDSEYQLPYVLGSAHQGCLPPFPADVFMIPQYGYLTLNNGSQSVGRSSFYCLEYFPSQMLRTGNNFTFSYTFEDVPFHSSYAHSQSLDRLMNPLIDQYLYYLARTQSNAGGTAGNRELQFYQGGPTTMAEQAKNWLPGPCFRQQRVSKTLDQNNNSNFAWTGATKYHLNGRNSLVNPGVAMATHKDDEERFFPSSGVLIFGKTGAANKTTLENVLMTNEEEIRPTNPVATEEYGTVSSNLQAANTAAQTQVVNNQGALPGMVWQNRDVYLQGPIWAKIPHTDGNFHPSPLMGGFGLKHPPPQILIKNTPVPANPPEVFTPAKFASFITQYSTGQVSVEIEWELQKENSKRWNPEIQYTSNFDKQTGVDFAVDSQGVYSEPRPIGTRYLTRNL

SEQ ID NO: 823 - DNA, 2214 bp, unidentified
  source 1..2214: mol_type = unassigned DNA; note = Adeno-associated virus
atggctgctgacggttatcttccagattggctcgaggacaacctctctgagggcattcgcgagtggtgggacctgaaacctggagcccccaagcccaaggccaaccagcagaagcaggacgacggccggggtctggtgcttcctggctacaagtacctcggacccttcaacggactcgacaagggggagcccgtcaacgcggcggacgcagcggccctcgagcacgacaaggcctacgaccagcagctcaaagcgggtgacaatccgtacctgcggtataaccacgccgacgccgagtttcaggagcgtctgcaagaagatacgtcttttgggggcaacctcgggcgagcagtcttccaggccaagaagcgggttctcgaacctctcggtctggttgaggaagctgctaagacggctcctggaaagaagagaccggtagaaccgtcacctcagcgttcccccgactcctccacgggcatcggcaagaaaggccagcagcccgctagaaagagactgaactttgggcagactggcgactcagagtcagtccccgaccctcaaccaatcggagaaccaccagcaggcccctctggtctgggatctggtacaatggctgcaggcggtggcgcaccaatggctgacaataacaagggcgccgacggagtgggtaatgcctcaggaaattggcattgcgattccacatggctgggcgacagagtcatcaccaccagcacccgaacctgggctttgcccacctacaacaaccacctctacaagcaaatctccagtcagtcagcaggtagcaccaacgacaacgtctacttcggctacagcaccccctgggggtattttgacttcaacagattccactgtcacttctcaccacgtgactggcagcggctcatcaacagcaactggggattccggcccaagaagctcaacttcaagctgttcaacatccaggtcaaggaggtcacaacgaatgacggcgtcacgaccatcgccaataaccttaccagcacggttcaggtcttttcggactcggaataccagctgccctacgtcctcggctccgcacaccagggctgcctgcctccgttcccggcggacgtcttcatgattccccagtacggctacctgactctgaacaatggcagccaatcggtgggtcgttcctctttctactgcctggaatatttcccttctcaaatgctgagaacgggcaacaacttcaccttcagctacaccttcgaggacgttcccttccacagcagctacgcacacagccagagcctggaccggctgatgaatcctcttatcgaccagtacctgtattacctggccagaacacagagcaacgcaggaggcacagctggcaatcgggaactgcagttttatcagggcgggcctaccaccatggccgaacaagccaaaaactggctgcctggaccttgcttccggcaacaaagagtctccaagacgctggatcaaaacaacaacagcaactttgcttggactggtgccaccaaataccatctaaatggaagaaattcattggttaatcccggtgtcgccatggcaacccacaaggacgacgaggaacgcttcttcccttcgagcggagtcctgatttttggaaaaactggagcagctaataagactacactggaaaatgtgttaatgacaaatgaagaggaaattcgtcctaccaacccggtagccaccgaggaatacgggactgttagcagcaacctgcaggcggctaacactgcagcccagacacaagttgtcaacaaccagggagccttacctggtatggtctggcagaaccgggacgtgtacctgcagggtcccatctgggccaagattcctcacacggacggcaactttcacccgtctccgctgatgggcggctttggactgaagcatccgcctcctcagatcctgatcaaaaacactcctgttcctgctaatcccccggaggtgtttacgcctgccaagtttgcttctttcatcacacagtacagcaccggccaggtcagcgtggagatcgagtgggagctgcagaaggagaacagcaagcgctggaacccagagattcagtatacctccaattttgacaaacagactggtgtggactttgccgttgacagccagggtgtttattctgagcctcgccccattggtactcgttacctcacccgtaatctgtaa

SEQ ID NO: 824 - DNA, 2217 bp, unidentified
  source 1..2217: mol_type = unassigned DNA; note = Adeno-associated virus
atggctgccgatggttatcttccagattggctcgaggacaacctctctgagggcattcgcgagtggtgggacctgaaacctggagccccgaaacccaaagccaaccagcaaaagcaggacgacggccggggtctggtgcttcctggctacaagtacctcggacccttcaacggactcgacaagggggagcccgtcaacgcggcggacgcagcggccctcgagcacgacaaggcctacgaccagcagctcaaagcgggtgacaatccgcacctgcggtataatcacgccgacgccgagtttcaggagcgtctgcaagaagatacgtcttttgggggcaacctcgggcgagcagtcttccaggccaagaagcgggttctcgaacctctcggtctggttgaggaaggcgctaagacggctcctggaaagaagagaccggtagagccgtcaccacagcgttcccccgactcctccacgggcatcggcaagaaaggccagcagcccgccagaaagagactcaatttcggtcagactggcgactcagagtcagtccccgaccctcaacttatcggagaacctccagcagcgccctctagtgtgggatctggtacaatggctgcaggcggtggcgcaccaatggcagacaataacgaaggtgccgacggagtgggtagttcctcgggaaattggcattgcgattccacatggctgggcgacagagtcatcaccaccagcacccgaacctgggccctgcccacctacaacaaccacctctacaagcaaatctccaacgggacctcgggaggcagcaccaacgacaacacctactttggctacagcaccccctgggggtattttgactttaacagattccactgccacttctcaccacgtgactggcagcgactcatcaacaacaactggggattccggcccaagagactcagcttcaagctcttcaacatccaggtcaaagaggtcacgcagaatgaaggcaccaagaccatcgccaataacctcaccagcaccatccaggtgtttacggactcggagtaccagctgccgtacgtcctcggctctgcccaccagggctgcctgcctccgttcccggcggacgtcttcatgattcctcagtacggcaacctgactctcaacaacggtagtcaggccgtgggacgttcctccttctactgcctggagtacttcccctctcagatgctgagaacgggcaacaacttttccttcagctacactttcgaggacgtgcctttccacagcagctacgcgcacagccagagtttggacaggctgatgaatcctctcatcgaccagtacctgtactacctgtcaagaacccagtctacgggaggcacagcgggaacccagcagttgctgttttctcaggccgggcctagcaacatgtcggctcaggccagaaactggctgcctggaccctgctacagacagcagcgcgtctccacgacactgtcgcaaaacaacaacagcaactttgcctggactggtgccaccaagtatcatctgaacggcagagactctctggtgaatccgggcgtcgccatggcaaccaacaaggacgacgaggaccgcttcttcccatccagcggcatcctcatgtttggcaagcagggagctggaaaagacaacatgggctatagcaacgtgatgctaaccagcgaggaagaaatcaagaccaccaaccccgtggccacagaacagtatggcgtggtggctgataacctacagcagcaaaacaccgctcctattgtgggggccgtcaacagccagggagccttacctggcatggtctggcagaaccgggacgtgtacctgcagggtcctatttgggccaagattcctcacacagatggcaactttcacccgtctcctttaatgggcggctttggacttaaacatccgcctcctcagatcctcatcaaaaacactcctgttcctgcggatcctccaacagcgttcaaccaggccaagctgaattctttcatcacgcagtacggcaccggacaagtcagcgtggagatcgagtgggagctgcagaaggagaacagcaagcgctggaacccagagattcagtatacttccaactactacaaatctacaaatgtggactttgctgttaatactgagggtgtttactctgagcctcgccccattggcactcgttacctcacccgtaatctgtaa

SEQ ID NO: 825 - protein, 738 aa, unidentified
  source 1..738: note = Adeno-associated virus
MAADGYLPDWLEDNLSEGIREWWDLKPGAPKPKANQQKQDDGRGLVLPGYKYLGPFNGLDKGEPVNAADAAALEHDKAYDQQLKAGDNPHLRYNHADAEFQERLQEDTSFGGNLGRAVFQAKKRVLEPLGLVEEGAKTAPGKKRPVEPSPQRSPDSSTGIGKKGQQPARKRLNFGQTGDSESVPDPQLIGEPPAAPSSVGSGTMAAGGGAPMADNNEGADGVGSSSGNWHCDSTWLGDRVITTSTRTWALPTYNNHLYKQISNGTSGGSTNDNTYFGYSTPWGYFDFNRFHCHFSPRDWQRLINNNWGFRPKRLSFKLFNIQVKEVTQNEGTKTIANNLTSTIQVFTDSEYQLPYVLGSAHQGCLPPFPADVFMIPQYGNLTLNNGSQAVGRSSFYCLEYFPSQMLRTGNNFSFSYTFEDVPFHSSYAHSQSLDRLMNPLIDQYLYYLSRTQSTGGTAGTQQLLFSQAGPSNMSAQARNWLPGPCYRQQRVSTTLSQNNNSNFAWTGATKYHLNGRDSLVNPGVAMATNKDDEDRFFPSSGILMFGKQGAGKDNMGYSNVMLTSEEEIKTTNPVATEQYGVVADNLQQQNTAPIVGAVNSQGALPGMVWQNRDVYLQGPIWAKIPHTDGNFHPSPLMGGFGLKHPPPQILIKNTPVPADPPTAFNQAKLNSFITQYGTGQVSVEIEWELQKENSKRWNPEIQYTSNYYKSTNVDFAVNTEGVYSEPRPIGTRYLTRNL

SEQ ID NO: 826 - DNA, 2217 bp, unidentified
  source 1..2217: mol_type = unassigned DNA; note = Adeno-associated virus
atggctgccgatggttatcttccagattggctcgaggacaacctctctgagggcattcgcgagtggtgggacctgaaacctggagccccgaaacccaaagccaaccagcaaaagcaggacgacggccggggtctggtgcttcctggctacaagtacctcggacccttcaacggactcgacaagggggagcccgtcaacgcggcggacgcagcggccctcgagcacgacaaggcctacgaccagcagctcaaagcgggtgacaatccgtacctgcggtataatcacgccgacgccgagtttcaggagcgtctgcaagaagatacgtcttttgggggcaacctcgggcgagcagtcttccaggccaagaagcgggttctcgaacctctcggtctggttgaggaaggcgctaagacggctcctggaaagaagagaccggtagagccgtcaccacagcgttcccccgactcctccacgggcatcggcaagaaaggccagcagcccgccggaaagagactcaatttcggtcagactggcgactcagagtcagtccccgaccctcaacctatcggagaacctccagcagcgccctctagtgtgggatctggtacaatggctgcaggcggtggcgcaccaatggcagacaataacgaaggtgccgacggagtgggtagttcctcgggaaattggcattgcgattccacatggctgggcgacagagtcatcaccaccagcacccgaacctgggccctgcccacctacaacaaccacctctacaagcaaatctccaacgggacctcgggaggcagcaccaacgacaacacctactttggctacagcaccccctgggggtattttgactttaacagattccactgccacttctcaccacgtgactggcagcgactcatcaacaacaactggggattccggcccaagagactcagcttcaagctcttcaacatccaggtcaaagaggtcacgcagaatgaaggcaccaagaccatcgccaataacctcaccagcaccatccaggtgtttacggactcggaataccagctgccgtacgtcctcggctctgcccaccagggctgcctgcctccgttcccggcggacgtcttcatgattcctcagtacggctacctgactctcaacaacggtagtcaggccgtgggacgttcctccttctactgcctggagtacttcccctctcagatgctgagaacgggcaacaacttttccttcagctacactttcgaggacgtgcctttccacagcagctacgcgcacagccagagtttggacaggctgatgaatcctctcgtcgaccagtacctgtactacctgtcaagaacccagtctacgggaggcacagcgggaacccagcagttgctgttttctcaggccgggcctagcaacatgtcggctcaggccagaaactggctgcctggaccctgctacagacagcagcgcgtctccacgacactgtcgcaaaacaacaacagcaactttgcctggactggtgccaccaagtatcatctgaacggcagagactctctggtgaatccgggcgtcgccatggcaaccaacaaggacgacgaggaccgcttcttcccatccagcggcatcctcatgtttggcaagcagggagctggaaaagacaacgtggactatagcaacgtgatgctaaccagcgaggaagaaatcaagaccaccaaccccgtggccacagaacagtatggcgtggtggctgataacctacagcagcaaaacaccgctcctattgtgggggccgtcaacagccagggagccttacctggcatggtctggcagaaccgggacgtgtacctgcagggtcctatttgggccaagattcctcacacagatggcaactttcacccgtctcctttaatgggcggctttggacttaaacatccgcctcctcagatcctcatcaaaaacactcctgttcctgcggatcctccaacagcgttcaaccaggccaagctgaattctttcatcacgcagtacagcaccggacaagtcagcgtggagatcgagtgggagctgcagaaggagaacagcaagcgctggagcccagagattcagtatacttccaactactacaaatctacaaatgtggactttgctgttaatactgagggtgtttactctgagcctcgccccattggcactcgttacctcacccgtaatctgtaa

SEQ ID NO: 827 - protein, 738 aa, unidentified
  source 1..738: note = Adeno-associated virus
MAADGYLPDWLEDNLSEGIREWWDLKPGAPKPKANQQKQDDGRGLVLPGYKYLGPFNGLDKGEPVNAADAAALEHDKAYDQQLKAGDNPYLRYNHADAEFQERLQEDTSFGGNLGRAVFQAKKRVLEPLGLVEEGAKTAPGKKRPVEPSPQRSPDSSTGIGKKGQQPAGKRLNFGQTGDSESVPDPQPIGEPPAAPSSVGSGTMAAGGGAPMADNNEGADGVGSSSGNWHCDSTWLGDRVITTSTRTWALPTYNNHLYKQISNGTSGGSTNDNTYFGYSTPWGYFDFNRFHCHFSPRDWQRLINNNWGFRPKRLSFKLFNIQVKEVTQNEGTKTIANNLTSTIQVFTDSEYQLPYVLGSAHQGCLPPFPADVFMIPQYGYLTLNNGSQAVGRSSFYCLEYFPSQMLRTGNNFSFSYTFEDVPFHSSYAHSQSLDRLMNPLVDQYLYYLSRTQSTGGTAGTQQLLFSQAGPSNMSAQARNWLPGPCYRQQRVSTTLSQNNNSNFAWTGATKYHLNGRDSLVNPGVAMATNKDDEDRFFPSSGILMFGKQGAGKDNVDYSNVMLTSEEEIKTTNPVATEQYGVVADNLQQQNTAPIVGAVNSQGALPGMVWQNRDVYLQGPIWAKIPHTDGNFHPSPLMGGFGLKHPPPQILIKNTPVPADPPTAFNQAKLNSFITQYSTGQVSVEIEWELQKENSKRWSPEIQYTSNYYKSTNVDFAVNTEGVYSEPRPIGTRYLTRNL

SEQ ID NO: 828 - DNA, 2217 bp, unidentified
  source 1..2217: mol_type = unassigned DNA; note = Adeno-associated virus
atggttgccgatggttatcttccagattggctcgaggacaacctctctgagggcattcgcgagtggtgggacctgaaacctggagccccgaaacccaaagccaaccagcaaaagcagggcgacggccggggtctggtgcttcctggctacaagtacctcggacccttcaacggactcgacaagggggagcccgtcaacgcggcggacgcagcggccctcgagcacgacaaggcctacgaccagcagcttaaagcgggtgacaatccgtacctgcggtataatcacgccgacgccgagcttcaggagcgtctgcaagaagatacgtcttttgggggcaacctcgggcgagcagtcttccaggccaagaagcgggttctcgaacctctcggtctggttgaggaaggcgctaagacggctcctggaaagaagagaccggtagagccgtcaccacagcgttcccccgactcctccacgggcatcggcaagaaaggccagcagcccgccagaaagagactcaatttcggtcagactggcgactcagagtcagtccccgaccctcaacctatcggagaacctccagcagcgccctctagtgtgggatctggtacaatggctgcaggcggtggcgcgccaatggcagacaataacgaaggtgccgacggagtgggtagttcctcgggaaattggcattgcgattccacatggctgggcgacagagtcatcaccaccagcacccgaacctgggccctgcccacctacaacaaccacctctacaagcaaatctccaacgggacctcgggaggcagcaccaacgacaacacctactttggctacagcaccccctgggggtattttgactttaacagattccactgccacttctcaccacgtgactggcagcgactcatcaacaacaactggggattccggcccaagagactcagcttcaagctcttcaacatccaggtcaaagaggtcacgcagaatgaaggcaccaagaccatcgccaataacctcaccagcaccatccaggtgtttacggactcggaataccagctgccgtacgtcctcggctctgcccaccagggctgccagcctccgttcccggcggacgtcttcatgattcctcagtacggctacctgactctcaacaacggtagtcaggccgtgggacgttcctccttctactgcctggagtacttcccctctcagatgctgagaacgggcaacaacttttccttcagctacactttcgaggacgtgcctttccacagcagctacgcgcacagccagagtttggacaggctgatgaatcctctcatcgaccagtacctgtactacctgtcaagaacccagtctacgggaggcacagcgggaacccagcagttgctgttttctcaggccgggcctagcaacatgtcggctcaggccagaaactggctgcctggaccctgctacagacagcagcgcgtctccacgacactgtcgcaaaacaacaacagcaactttgcctggactggtgccaccaagtatcatctgaacggcagagactctctggtgaatccgggcgtcgccatggcaaccaacaaggacgacgaggaccgcttcttcccatccagcggcatcctcatgtttggcaagcagggagctggaaaagacaacgtggactatagcaacgtgatgctaaccagcgaggaagaaatcaagaccaccaaccccgtggccacagaacagtatggcgtggtggctgataacctacagcagcaaaacaccgctcctattgtgggggccgtcaacagccagggagccttacctggcatggtctggcagaaccgggacgtgtacctgcagggtcctatttgggccaagattcctcacacagatggcaactttcacccgtctcctttaatgggcggctttggacttaaacatccgcctcctcagatcctcatcaaaaacactcctgttcctgcggatcctccaacagcgttcaaccaggccaagctgaattctttcatcacgcagtacagcaccggacaagtcagcgtggagatcgagtgggagccgcagaaggagaacagcaagcgctggaacccagagattcagtatacttccaactactacaaatctacaaatgtggactttgctgttaatactgagggtgtttactctgagcctcgccccattggcactcgttacctcacccgtaatctgtaa

SEQ ID NO: 829 - protein, 738 aa, unidentified
  source 1..738: note = Adeno-associated virus
MVADGYLPDWLEDNLSEGIREWWDLKPGAPKPKANQQKQGDGRGLVLPGYKYLGPFNGLDKGEPVNAADAAALEHDKAYDQQLKAGDNPYLRYNHADAELQERLQEDTSFGGNLGRAVFQAKKRVLEPLGLVEEGAKTAPGKKRPVEPSPQRSPDSSTGIGKKGQQPARKRLNFGQTGDSESVPDPQPIGEPPAAPSSVGSGTMAAGGGAPMADNNEGADGVGSSSGNWHCDSTWLGDRVITTSTRTWALPTYNNHLYKQISNGTSGGSTNDNTYFGYSTPWGYFDFNRFHCHFSPRDWQRLINNNWGFRPKRLSFKLFNIQVKEVTQNEGTKTIANNLTSTIQVFTDSEYQLPYVLGSAHQGCQPPFPADVFMIPQYGYLTLNNGSQAVGRSSFYCLEYFPSQMLRTGNNFSFSYTFEDVPFHSSYAHSQSLDRLMNPLIDQYLYYLSRTQSTGGTAGTQQLLFSQAGPSNMSAQARNWLPGPCYRQQRVSTTLSQNNNSNFAWTGATKYHLNGRDSLVNPGVAMATNKDDEDRFFPSSGILMFGKQGAGKDNVDYSNVMLTSEEEIKTTNPVATEQYGVVADNLQQQNTAPIVGAVNSQGALPGMVWQNRDVYLQGPIWAKIPHTDGNFHPSPLMGGFGLKHPPPQILIKNTPVPADPPTAFNQAKLNSFITQYSTGQVSVEIEWEPQKENSKRWNPEIQYTSNYYKSTNVDFAVNTEGVYSEPRPIGTRYLTRNL

SEQ ID NO: 830 - DNA, 2217 bp, unidentified
  source 1..2217: mol_type = unassigned DNA; note = Adeno-associated virus
atggctgccgatggttatcttccagattggctcgaggacaacctctctgagggcattcgcgagtggtgggacctgaaacctggagccccgaaacccaaagccaaccagcaaaagcaggacgacggccggggtctggtgcttcctggctacaagtacctcggacccttcaacggactcgacaagggggagcccgtcaacgcggcggacgcagcggccctcgagcacgacaaggcctacgaccagcagctcaaagcgggtgacaatccgtacctgcggtataatcacgccgacgccgagtttcaggagcgtctgcaagaagatacgtcttttgggggcaacctcgggcgagcagtcttccaggccaagaagcgggttctcgaacctctcggtctggttgaggaaggcgctaagacggctcctggaaagaagagaccggtagagccgtcaccacagcgttcccccgactcctccacgggcatcggcaagaaaggccagcagcccgccagaaagagactcaatttcggtcagactggcgactcagagtcagtccccgaccctcaacctatcggagaacctccagcagcgccctctagtgtgggatctggtacaatggctgcaggcggtggcgcaccaatggcagacaataacgaaggtgccgacggagtgggtagttcctcgggaaattggcattgcgattccacatggctgggcgacagagtcatcaccaccagcacccgaacctgggccctgcccacctacaacaaccacctctacaagcaaatctccaacgggacctcgggaggcagcaccaacgacaacacctactttggctacagcaccccctgggggtattttgactttaacagattccactgccacttctcaccacgtgactggcagcgactcatcaacaacaactggggattccggcccaagagactcagcttcaagctcttcaacatccaggtcaaagaggtcacgcagaatgaaggcaccaagaccatcgccaatagcctcaccagcaccatccaggtgtttacggactcggaataccagctgccgtacgtcctcggctctgcccaccagggctgcctgcctccgttcccggcggacgtcttcatgattcctcagtacggctacctgactcccaacaacggtagtcaggccgtgggacgttcctccttctactgcctggagtacttcccctctcagatgctgagaacgggcaacaacttttccttcagctacactttcgaggacgtgcctttccacagcagctacgcgcacagccagagtttggacaggctgatgaatcctctcatcgaccagtacctgtactacctgtcaagaacccagtctacgggaggcacagcgggaacccagcagttgctgtcttctcaggccgggcctagcaacatgtcggctcaggccagaaactggctgcctggaccctgctacagacagcagcgcgtctccacgacactgtcgcaaaacaacaacagcaactttgcctggactggtgccaccaagtatcatctgaacggcagagactctctggtgaatccgggcgtcgccatggcaaccaacaaggacgacgaggaccgcttcttcccatccagcggcatcctcatgtttggcaagcagggagctggaaaagacaacgtggactatagcaacgtgatgctaaccagcgaggaagaaatcaagaccaccaaccccgtggccacagaacagtatggcgtggtggctgataacctacagcagcaaaacaccgctcctattgtgggggccgtcaacagccagggagccttacctggcatggtctggcagaaccgggacgtgtacttgcagggtcctatttgggccaagattcctcacacagatggcaactttcacccgtctcctttaatgggcggctttggacttaaacatccgcctcctcagatcctcatcaaaaacactcctgttcctgcggatcctccaacagcgttcaaccaggccaagctgaattctttcatcacgcagtacagcaccggacaagtcagcgtggagatcgagtgggagctgcagaaggagaacagcaagcgctggaacccagagattcagtatacttccaactactacaaatctacaaatgtggactttgctgttaatactgagggtgtttactctgagcctcgccccattggcactcgttacctcacccgtaatctgtaa

SEQ ID NO: 831 - protein, 738 aa, unidentified
  source 1..738: note = Adeno-associated virus
MAADGYLPDWLEDNLSEGIREWWDLKPGAPKPKANQQKQDDGRGLVLPGYKYLGPFNGLDKGEPVNAADAAALEHDKAYDQQLKAGDNPYLRYNHADAEFQERLQEDTSFGGNLGRAVFQAKKRVLEPLGLVEEGAKTAPGKKRPVEPSPQRSPDSSTGIGKKGQQPARKRLNFGQTGDSESVPDPQPIGEPPAAPSSVGSGTMAAGGGAPMADNNEGADGVGSSSGNWHCDSTWLGDRVITTSTRTWALPTYNNHLYKQISNGTSGGSTNDNTYFGYSTPWGYFDFNRFHCHFSPRDWQRLINNNWGFRPKRLSFKLFNIQVKEVTQNEGTKTIANSLTSTIQVFTDSEYQLPYVLGSAHQGCLPPFPADVFMIPQYGYLTPNNGSQAVGRSSFYCLEYFPSQMLRTGNNFSFSYTFEDVPFHSSYAHSQSLDRLMNPLIDQYLYYLSRTQSTGGTAGTQQLLSSQAGPSNMSAQARNWLPGPCYRQQRVSTTLSQNNNSNFAWTGATKYHLNGRDSLVNPGVAMATNKDDEDRFFPSSGILMFGKQGAGKDNVDYSNVMLTSEEEIKTTNPVATEQYGVVADNLQQQNTAPIVGAVNSQGALPGMVWQNRDVYLQGPIWAKIPHTDGNFHPSPLMGGFGLKHPPPQILIKNTPVPADPPTAFNQAKLNSFITQYSTGQVSVEIEWELQKENSKRWNPEIQYTSNYYKSTNVDFAVNTEGVYSEPRPIGTRYLTRNL

SEQ ID NO: 832 - protein, 738 aa, unidentified
  source 1..738: note = Adeno-associated virus
MAADGYLPDWLEDNLSEGIREWWDLKPGAPKPKANQQKQDDGRGLVLPGYKYLGPFNGLDKGEPVNAADAAALEHDKAYDQQLKAGDNPYLRYNHADAEFQERLQEDTSFGGNLGRAVFQAKKRVLEPLGLVEEGAKTAPGKKRPVEPSPQRSPDSSTGIGKKGQQPARKRLNFGQTGDSESVPDPQPIGEPPAAPSSVGSGTMAAGGGAPMADNNEGADGVGSSSGNWHCDSTWLGDRVITTSTRTWALPTYNNHLYKQISNGTSGGSTNDNTYFGYSTPWGYFDFNRFHCHFSPRDWQRLINNNWGFRPKRLSFKLFNIQVKEVTQNEGTKTIANNLTSTIQVFTDSEYQLPYVLGSAHQGCLPPFPADVFMIPQYGYLTLNNGSQAVGRSSFYCLEYFPSQMLRTGNNFSFSYTFEDVPFHSSYVHSQSLDRLMNPLIDQYLYYLSRTQSTGGTAGTQQLLFSQAGPSNMSAQARNWLPGPCYRQQRVSTTLSQNNNSNFAWTGATKYHLNGRDSLVNSGVAMATNKDDEDRFFPSSGILMFGKQGAGKDNVDYSNVMLTSEEEIKTTNPVATEQYGVVADNLQQQNTAPIVGAVNSQGALPGMVWQNRDVYLQGPIWAKIPHTDGNFHPSPLMGGFGLKHPPPQILIKNTPVPADPPTAFNQAKLNSFITQYSTGQVSVEIEWELQKENSKRWNPEIQYTSNYYKSTNVDFAVNTEGVYSEPRPIGTRYPTRNL

SEQ ID NO: 833 - DNA, 2217 bp, unidentified
  source 1..2217: mol_type = unassigned DNA; note = Adeno-associated virus
atggctgccgatggttatcttccagattggctcgaggacaacctctctgagggcattcgcgagtggtgggacctgaaacctggagccccgaaacccaaagccaaccagcaaaagcaggacgacggccggggtctggtgcttcctggctacaagtacctcggacccttcaacggactcgacaagggggagcccgtcaacgcggcggacgcagcggccctcgagcacgacaaggcctacgaccagcagctcaaagcgggtgacaatccgtacctgcggtataatcacgccgacgccgagtttcaggagcgtctgcaagaagatacgtcttttgggggcaacctcgggcgagcagtcttccaggccaagaagcgggttctcgaacctctcggtctggttgaggaaggcgctaagacggctcctggaaagaagagaccggtagagccgtcaccacagcgttcccccgactcctccacgggcatcggcaagaaaggccagcagcccgccagaaagagactcaatttcggtcagactggcgactcagagtcagtccccgaccctcaacctatcggagaacctccagcagcgccctctagtgtgggatctggtacaatggctgcaggcggtggcgcaccaatggcagacaataacgaaggtgccgacggagtgggtagttcctcgggaaattggcattgcgattccacatggctgggcgacagagtcatcaccaccagcacccgaacctgggccctgcccacctacaacaaccacctctacaagcaaatctccaacgggacctcgggaggcagcaccaacgacaacacctactttggctacagcaccccctgggggtattttgactttaacagattccactgccacttctcaccacgtgactggcagcgactcatcaacaacaactggggattccggcccaagagactcagcttcaagctcttcaacatccaggtcaaagaggtcacgcagaatgaaggcaccaagaccatcgccaataacctcaccagcaccatccaggtgtttacggactcggaataccagctgccgtacgtcctcggctctgcccaccagggctgcctgcctccgttcccggcggacgtcttcatgattcctcagtacggctacctgactctcaacaacggtagtcaggccgtgggacgttcctccttctactgcctggagtacttcccctctcagatgctgagaacgggcaacaacttttccttcagctacactttcgaggacgtgcctttccacagcagctacgtgcacagccagagtttggacaggctgatgaatcctctcatcgaccagtacctgtactacctgtcaagaacccagtctacgggaggcacagcgggaacccagcagttgctgttttctcaggccgggcctagcaacatgtcggctcaggccagaaactggctgcctggaccctgctacagacagcagcgcgtctccacgacactgtcgcaaaacaacaacagcaactttgcctggactggtgccaccaagtatcatctgaacggcagagactctctggtgaattcgggcgtcgccatggcaaccaacaaggacgacgaggaccgcttcttcccatccagcggcatcctcatgtttggcaagcagggagctggaaaagacaacgtggactatagcaacgtgatgctaaccagcgaggaagaaatcaagaccaccaaccccgtggccacagaacagtatggcgtggtggctgataacctacagcagcaaaacaccgctcctattgtgggggccgtcaacagccagggagccttacctggcatggtctggcagaaccgggacgtgtacctgcagggtcctatttgggccaagattcctcacacagatggcaactttcacccgtctcctttaatgggcggctttggacttaaacatccgcctcctcagatcctcatcaaaaacactcctgttcctgcggatcctccaacagcgttcaaccaggccaagctgaattctttcatcacgcagtacagcaccggacaagtcagcgtggagatcgagtgggagctgcagaaggagaacagcaagcgctggaacccagagattcagtatacttccaactactacaaatctacaaatgtggactttgctgttaatactgagggtgtttactctgagcctcgccccattggcactcgttaccccacccgtaatctgtaa

SEQ ID NO: 834 - protein, 734 aa, unidentified; identical to SEQ ID NO: 659
  source 1..734: note = Adeno-associated virus

SEQ ID NO: 835 - DNA, 2214 bp, unidentified
  source 1..2214: mol_type = unassigned DNA; note = Adeno-associated virus
atggctgctgacggttatcttccagattggctcgaggacaacctctctgagggcattcgcgagtggtgggacctgaaacctggagccccgaaacccaaagccaaccagcagaagcaggacgacggccggggtctggtgcttcctggctacaagtacctcggacccttcaacggactcgacaagggggagcccgtcaacgcggcggacgcagcggccctcgagcacgacaaggcctacgaccagcagctcaaagcgggtgacaatccgtacctgcggtataaccacgccgacgccgagtttcaggagcgtctgcaagaagatacgtcttttgggggcaacctcgggcgagcagtcttccaggccaagaagcgggttctcgaacctctcggtctggttgaggaagctgctaagacggctcctggaaagaagagaccggtagaaccgtcacctcagcgttcccccgactcctccacgggcatcggcaagaaaggccagcagcccgctagaaagagactgaactttgggcagactggcgactcagagtcagtccccgaccctcaacctctcggagaaccaccagcaggcccctctggtctgggatctggtacaatggctgcaggcggtggcgctccaatggcagacaataacgaaggcgccgacggagtgggtaatgcctcaggaaattggcattgcgattccacatggctgggcgacagagtcatcaccaccagcacccgaacctgggctttgcccacctacaacaaccacctctacaagcaaatctccagtcagtcagcaggtagcaccaacgacaacgtctacttcggctacagcaccccctgggggtattttgacttcaacagattccactgtcacttctcaccacgtgactggcagcgactcatcaacaacaactggggattccggcccaagaagctcaacttcaagctcttcaacatccaagtcaaggaggtcacgacgaatgacggcgtcacgaccatcgctaataaccttaccagcacggttcaggtcttttcggactcggagtaccagctgccgtacgtcctcggctctgcccaccagggctgcctgcctccgttcccggcggacgtcttcatgattcctcagtacggctacctgactctgaacaatggcagccaatcggtgggacgttcatccttctactgcctggaatacttcccttctcaggtgctgagaacgggtaacaacttcaccttcagttacaccttcgaggacgtgcctttccacagcagctacgcgcacagccagagcctagaccggctgatgaatcccctcatcgaccagtacctgtattacctggctagaacacagagtaacccaggaggcacatctggcaatcgggaactgcagttttaccagggcgggccttccaccatggccgaacaagccaagaactggttacctggaccttgcttccggcaacaaagagtttccaaaacactggatcaaaacaacaacagcaactttgcttggactggtgccaccaaatatcacctgaacggcagaaactcattggtgaatcctggtgtcgccatggcaactcacaaggacgacgaggaccgctttttcccatccagcggagtcctgatttttggaaaaactggagcaaccaacaagactacattggaaaacgtgttaatgacaaatgaagaagaaattcgtcctactaatcctgtggccacagaagaatacgggatagtcagcagcaatttacaagcggccaatactgcagcccagacacaagttgtcaacaaccagggagccttacctggcatggtctggcagaaccgggacgtgtacctgcagggtcccatctgggccaaaattcctcacacagacggcaactttcacccgtctccgctgatgggcggctttggactgaagcatccgcctcctcagatcctgatcaaaaacactcctgttcctgctaatcccccggaggtgtttacgcctgccaagtttgcttctttcatcacacagtacagcaccggccaggtcagcgtggagatcgagtgggagctgcagaaggagaacagcaagcgctggaacccagagattcagtatacctccaattttgacaaacagactggtgtggactttgccgttgacagccagggtgtttattctgagcctcgccccattggtactcgttacctcacccgtaatctgtaa

SEQ ID NO: 836 - protein, 737 aa, unidentified
  source 1..737: note = Adeno-associated virus
MAADGYLPDWLEDNLSEGIREWWDLKPGAPKPKANQQKQDDGRGLVLPGYKYLGPFNGLDKGEPVNAADAAALEHDKAYDQQLKAGDNPYLRYNHADAEFQERLQEDTSFGGNLGRAVFQAKKRVLEPLGLVEEAAKTAPGKKRPVEPSPQRSPDSSTGIGKKGQQPARKRLNFGQTGDSESVPDPQPLGEPPAGPSGLGSGTMAAGGGAPMADNNEGADGVGNASGNWHCDSTWLGDRVITTSTRTWALPTYNNHLYKQISSQSAGSTNDNVYFGYSTPWGYFDFNRFHCHFSPRDWQRLINNNWGFRPKKLNFKLFNIQVKEVTTNDGVTTIANNLTSTVQVFSDSEYQLPYVLGSAHQGCLPPFPADVFMIPQYGYLTLNNGSQSVGRSSFYCLEYFPSQVLRTGNNFTFSYTFEDVPFHSSYAHSQSLDRLMNPLIDQYLYYLARTQSNPGGTSGNRELQFYQGGPSTMAEQAKNWLPGPCFRQQRVSKTLDQNNNSNFAWTGATKYHLNGRNSLVNPGVAMATHKDDEDRFFPSSGVLIFGKTGATNKTTLENVLMTNEEEIRPTNPVATEEYGIVSSNLQAANTAAQTQVVNNQGALPGMVWQNRDVYLQGPIWAKIPHTDGNFHPSPLMGGFGLKHPPPQILIKNTPVPANPPEVFTPAKFASFITQYSTGQVSVEIEWELQKENSKRWNPEIQYTSNFDKQTGVDFAVDSQGVYSEPRPIGTRYLTRNL

SEQ ID NO: 837 - DNA, 2214 bp, unidentified
  source 1..2214: mol_type = unassigned DNA; note = Adeno-associated virus
atggctgccgatggttatcttccagattggctcgaggacaacctctctgagggcattcgcgagtggtgggacctgaaacctggagccccgaaacccaaagccaaccagcaaaagcaggacgacggccggggtctggtgcttcctggctacaagtacctcggacccttcaacggactcgacaagggggagcccgtcaacgcggcggacgcagcggccctcgagcacgacaaggcctacgaccagcagctcaaagcgggtgacaatccgtacctgcggtataatcacgccgacgccgagtttcaggagcgtctgcaagaagatacgtcttttgggggcaacctcgggcgagcagtcttccaggccaagaagcgggttctcgaacctctcggtctggttgaggaaggcgctaagacggctcctggaaagaagagaccggtagagccgtcaccacagcgttcccccgactcctccacgggcatcggcaagaaaggccagcagcccgccagaaagagactcaatttcggtcagactggcgactcagagtcagtccccgaccctcaacctatcggagaacctccagcagcgccctctagtgtgggatctggtacaatggctgcaggcggtggcgcaccaatggcagacaataacgaaggtgccgacggagtgggtagttcctcgggaaattggcattgcgattccacacggctgggcgacagagtcatcaccaccagcacccggacctgggctttgcccacctacaacaaccacctctacaagcaaatctccagtcagtcagcaggtagcaccaacgacaacgtctacttcggctacagcaccccctgggggtattttgacttcaacagattccactgtcacttctcaccacgtgactggcagcggctcatcaacaacaactggggattccggcccaagaagctcaacttcaagctgttcaacatccaggtcaaggaggtcacaacgaatgacggcgtcacgaccatcgccaataaccttaccagcacggttcaggtcttttcggactcggaataccagctgccctacgtcctcggctccgcacaccagggctgcctgcctccgttcccggcggacgtcttcatgattccccagtacggctacctgactctgaacaatggcagccaatcggtgggtcgttcctctttctactgcctggaatatttcccttctcaaatgctgagaacgggcaacaacttcaccttcagctacaccttcgaggacgttcccttccacagcagctacgcacacagccagagcctggaccggctgatgaatcctcttatcgaccagtacctgtattacctggccagaacacagagcaacgcaggaggcacagctggcaatcgggaactgcagttttatcagggcgggcctaccaccatggccgaacaagccaaaaactggctgcctggaccttgcttccggcaacgaagagtctccaagacgctggatcaaaacaacaacagcaactttgcttggactggtgccaccaaataccatctaaatggaagaaattcattggttaatcccggtgtcgccatggcaacccacaaggacgacgaggaacgcttcttcccttcgagcggagtcctgatttttggaaaaactggagcagctaataagactacactggaaaatgtgttaatgacaaatgaagaggaaattcgtcctaccaacccggtagccaccgaggaatacgggactgttagcagcaacctgcaggcggctaacactgcagcccagacacaagttgtcaacaaccagggagccttacctggtatggtctggcagaaccgggacgtgtacctgcagggtcccatctgggccaagattcctcacacggacggcaactttcacccgtctccgctgatgggcggctttggactgaagcatccgcctcctcagatcctgatcaaaaacactcctgttcctgctaatcccccggaggtgtttacgcctgccaagtttgcttctttcatcacacagtacagcaccggccaggtcagcgtggagatcgagtgggagctgcagaaggagaacagcaagcgctggaacccagagattcagtatacctccaattttgacaaacagactggtgtggactttgccgttgacagccagggtgtttattctgagcctcgccccattggtactcgttacctcacccgtaatctgtaa

SEQ ID NO: 838 - protein, 737 aa, unidentified
  source 1..737: note = Adeno-associated virus
MAADGYLPDWLEDNLSEGIREWWDLKPGAPKPKANQQKQDDGRGLVLPGYKYLGPFNGLDKGEPVNAADAAALEHDKAYDQQLKAGDNPYLRYNHADAEFQERLQEDTSFGGNLGRAVFQAKKRVLEPLGLVEEGAKTAPGKKRPVEPSPQRSPDSSTGIGKKGQQPARKRLNFGQTGDSESVPDPQPIGEPPAAPSSVGSGTMAAGGGAPMADNNEGADGVGSSSGNWHCDSTRLGDRVITTSTRTWALPTYNNHLYKQISSQSAGSTNDNVYFGYSTPWGYFDFNRFHCHFSPRDWQRLINNNWGFRPKKLNFKLFNIQVKEVTTNDGVTTIANNLTSTVQVFSDSEYQLPYVLGSAHQGCLPPFPADVFMIPQYGYLTLNNGSQSVGRSSFYCLEYFPSQMLRTGNNFTFSYTFEDVPFHSSYAHSQSLDRLMNPLIDQYLYYLARTQSNAGGTAGNRELQFYQGGPTTMAEQAKNWLPGPCFRQRRVSKTLDQNNNSNFAWTGATKYHLNGRNSLVNPGVAMATHKDDEERFFPSSGVLIFGKTGAANKTTLENVLMTNEEEIRPTNPVATEEYGTVSSNLQAANTAAQTQVVNNQGALPGMVWQNRDVYLQGPIWAKIPHTDGNFHPSPLMGGFGLKHPPPQILIKNTPVPANPPEVFTPAKFASFITQYSTGQVSVEIEWELQKENSKRWNPEIQYTSNFDKQTGVDFAVDSQGVYSEPRPIGTRYLTRNL

SEQ ID NO: 839 - DNA, 2208 bp, unidentified
  source 1..2208: mol_type = unassigned DNA; note = Adeno-associated virus
atggctgccgatggttatcttccagattggctcgaggacactctctctgaaggaataagacagtggtggaagctcaaacctggcccaccaccaccaaagcccgcagagcggcataaggacgacagcaggggtcttgtgcttcctgggtacaagtacctcggacccttcaacggactcgacaagggggagccggtcaacgaggcagacgccgcggccctcgagcacgacaaggcctacgaccggcagctcgacagcggagacaacccgtacctcaagtacaaccacgccgacgcggagtttcaggagcgtcttaaagaagatacgtcttttgggggcaacctcggacgagcagtcttccaggcgaaaaagagggttcttgaacctctgggcctggttgaggaacctgttaagacggctccgggaaaaaagaggccggtagagcactctcctgcggagccagactcctcctcgggaaccggaaaagcgggccagcagcctgcaagaaaaagattgaattttggtcagactggagacgcagactccgtacctgacccccagcctctcggacagccaccagcagccccctctggtttgggatctactacaatggctacaggcagtggcgcaccaatggcagacaataacgagggtgccgatggagtgggtaattcttcaggaaattggcattgcgattcccaatggctgggcgacagagtcatcaccaccagcacccgaacctgggcccagcccacctacaacaaccacctctacaagcaaatctcaagccaatcaggagcctcaaacgacaaccactactttggctacagcaccccttgggggtattttgacttcaacagattccactgccacttttcaccacgtgactggcaaagactcatcaacaacaactggggattccgacccaagagactcaacttcaagctctttaacattcaagtcaaagaggtcacgcagaatgacggtacgacgacgattgccaataaccttaccagcacggttcaggtgtttactgactcggagtaccagctcccgtacgtcctcgggtcggcgcatcaaggatgcctcccgccgtttccagcggacgtcttcatggtcccacagtatggatacctcaccctgaacaacgggagtcaggcggtaggacgctcttccttttactgcctggagtactttccttctcagatgcttcgtactggaaacaactttcagttcagctacacctttgaagacgttcctttccacagcagctacgctcacagccagagtctggatcggctgatgaatcctctgatcgaccagtacctgtattatctgaacaaaacacaatcaaatagtggagctcttcagcagtctcggctactgtttagtcaagctggacccaccagcatgtctcttcaagctaaaaactggctacctggaccttgctacagacagcagcgtctgtcaaagcaggcaaacgacaacaacaacagcaactttccctggactgcggctacaaagtaccacctaaatggccgggactcgttggttaatccaggaccagctatggccagtcacaaagacgatgaagaaaagtttttccccatgcatggaaccctgatatttggtaaacaaggaacaaatgctaacgacgcggatttggacaatgtcatgattacagatgaagaagaaatccgcaccaccaatcccgtggctacggagcagtacggatatgtgtcaaataatttgcaaaactcaaatactggtccaactactggaactgtcaatcaccgaggagcgttacctggcatggtgtggcaggatcgagacgtgtacctgcagggacccatttgggccaagattcctcacaccgatggacactttcatccttctccactgatgggaggttttgggctcaaacacccgcctcctcagatcatgatcaaaaacactcccgttccagccaatcctcccacaaacttcagttctgccaagtttgcttctttcatcacacagtattccacggggcaggtcagcgtggagatcgagtgggagctgcagaaagagaacagcaaacgctggaatcccgaaattcagtacacttccaactacaacaaatctgttaatgtggactttactgtggacactaatggcgtgtattcagagcctcgccccattggcaccagatacctgactcgtaatctgtaa

SEQ ID NO: 840 - protein, 735 aa, unidentified
  source 1..735: note = Adeno-associated virus
MAADGYLPDWLEDTLSEGIRQWWKLKPGPPPPKPAERHKDDSRGLVLPGYKYLGPFNGLDKGEPVNEADAAALEHDKAYDRQLDSGDNPYLKYNHADAEFQERLKEDTSFGGNLGRAVFQAKKRVLEPLGLVEEPVKTAPGKKRPVEHSPAEPDSSSGTGKAGQQPARKRLNFGQTGDADSVPDPQPLGQPPAAPSGLGSTTMATGSGAPMADNNEGADGVGNSSGNWHCDSQWLGDRVITTSTRTWAQPTYNNHLYKQISSQSGASNDNHYFGYSTPWGYFDFNRFHCHFSPRDWQRLINNNWGFRPKRLNFKLFNIQVKEVTQNDGTTTIANNLTSTVQVFTDSEYQLPYVLGSAHQGCLPPFPADVFMVPQYGYLTLNNGSQAVGRSSFYCLEYFPSQMLRTGNNFQFSYTFEDVPFHSSYAHSQSLDRLMNPLIDQYLYYLNKTQSNSGALQQSRLLFSQAGPTSMSLQAKNWLPGPCYRQQRLSKQANDNNNSNFPWTAATKYHLNGRDSLVNPGPAMASHKDDEEKFFPMHGTLIFGKQGTNANDADLDNVMITDEEEIRTTNPVATEQYGYVSNNLQNSNTGPTTGTVNHRGALPGMVWQDRDVYLQGPIWAKIPHTDGHFHPSPLMGGFGLKHPPPQIMIKNTPVPANPPTNFSSAKFASFITQYSTGQVSVEIEWELQKENSKRWNPEIQYTSNYNKSVNVDFTVDTNGVYSEPRPIGTRYLTRNL

SEQ ID NO: 841 - DNA, 2217 bp, unidentified
  source 1..2217: mol_type = unassigned DNA; note = Adeno-associated virus
atggctgccgatggttatcttccagattggctcgaggacaacctctctgagggcattcgcgagtggtgggcgctgaaacctggagccccgaagcccaaagccaaccagcaaaagcaggacgacggccggggtctggtgcttcctggctacaagtacctcggacccttcaacggactcgacaagggggagcccgtcaacgcggcggacgcagcggccctcgagcacgacaaggcctacgaccagcagctgcaggcgggtgacaatccgtacctgcggtataatcacgccgacgccgagtttcaggagcgtctgcaagaagatacgtcttttgggggcaacctcgggcgagcagtcttccaggccaagaagcgggttctcgaacctctcggtctggttgaggaaggcgctaagacggctcctggaaagaagagaccggtagagccgtcaccacagcgttcccccgactcctccacgggcatcggcaagaaaggccagcagcccgccagaaagagactcaatttcggtcagactggcgactcagagtcagtccccgaccctcaacctatcggagaacctccagcagcgccctctagtgtgggatctggtacaatggctgcaggcggtggcgcgccaatggcagacaataacgaaggtgccgacggagtgggtagttcctcgggaaattggcattgcgattccacatggctgggcgacagagtcatcaccaccagcacccgaacctgggccctgcccacctacaacaaccacctctacaagcaaacctccaacgggacctcgggaggcagcaccaacgacaacacctactttggctacagcaccccctgggggtattttgactttaacagattccactgccacttctcaccacgtgactggcagcgactcatcaacaacaactggggattccggcccaagagactcagcttcaagctcttcaacatccaggtcaaagaggtcacgcagaatgaaggcaccaagaccatcgccaataacctcaccagcaccatccaggtgtttacggactcggaataccagctgccgtacgtcctcggctctgcccaccagggctgcctgcctccgttcccggcggacgtcttcatgattcctcagtacggctacctgactctcaacaacggtagtcaggccgtgggacgttcctccttctactgcctggagtacttcccctctcagatgctgagaacgggcaacaacttttccttcagctacactttcgaggacgtgcctttccacagcagctacgcgcacagccagagtttggacaggctgatgaatcctctcatcgaccagtacctgtactacctgtcaagaacccagtctacgggaggcacagcgggaacccagcagttgctgttttctcaggccgggcctagcaacatgtcggctcaggccagaaactggctgcctggaccctgctacagacagcagcgcgtctccacgacactgtcgcaaaacaacaacagcaactttgcctggactggtgccaccaagtatcatctgaacggcagagactctctggtgaatccgggcgtcgccatggcaaccaacaaggacgacgaggaccgcttcttcccatccagcggcatcctcatgtttggcaagcagggagctggaaaagacaacgtggactatagcaacgtgatgctaaccagcgaggaagaaatcaagaccaccaaccccgtggccacagaacagtatggcgtggtggctgataacctacagcagcaaaacaccgctcctattgtgggggccgtcaacagccagggagccttacctggcatggtctggcagaaccgggacgtgtacctgcagggtcctatttgggccaagattcctcacacagatggcaactttcacccgtctcctttaatgggcggctttggacttaaacatccgcctcctcagatcctcatcaaaaacactcctgttcctgcggatcctccaacagcgttcaaccaggccaagctgaattctttcatcacgcagtacagcaccggacaagtcagcgcggagatcgagtgggagctgcagaaggagaacagcaagcgctggaacccagagattcagtatacttccaactactacaaatctacaaatgtggactttgctgttaatactgagggtgtttactctgagcctcgccccattggcactcgttacctcacccgtaatctgtaa

SEQ ID NO: 842 - protein, 738 aa, unidentified
  source 1..738: note = Adeno-associated virus
MAADGYLPDWLEDNLSEGIREWWALKPGAPKPKANQQKQDDGRGLVLPGYKYLGPFNGLDKGEPVNAADAAALEHDKAYDQQLQAGDNPYLRYNHADAEFQERLQEDTSFGGNLGRAVFQAKKRVLEPLGLVEEGAKTAPGKKRPVEPSPQRSPDSSTGIGKKGQQPARKRLNFGQTGDSESVPDPQPIGEPPAAPSSVGSGTMAAGGGAPMADNNEGADGVGSSSGNWHCDSTWLGDRVITTSTRTWALPTYNNHLYKQTSNGTSGGSTNDNTYFGYSTPWGYFDFNRFHCHFSPRDWQRLINNNWGFRPKRLSFKLFNIQVKEVTQNEGTKTIANNLTSTIQVFTDSEYQLPYVLGSAHQGCLPPFPADVFMIPQYGYLTLNNGSQAVGRSSFYCLEYFPSQMLRTGNNFSFSYTFEDVPFHSSYAHSQSLDRLMNPLIDQYLYYLSRTQSTGGTAGTQQLLFSQAGPSNMSAQARNWLPGPCYRQQRVSTTLSQNNNSNFAWTGATKYHLNGRDSLVNPGVAMATNKDDEDRFFPSSGILMFGKQGAGKDNVDYSNVMLTSEEEIKTTNPVATEQYGVVADNLQQQNTAPIVGAVNSQGALPGMVWQNRDVYLQGPIWAKIPHTDGNFHPSPLMGGFGLKHPPPQILIKNTPVPADPPTAFNQAKLNSFITQYSTGQVSAEIEWELQKENSKRWNPEIQYTSNYYKSTNVDFAVNTEGVYSEPRPIGTRYLTRNL

SEQ ID NO: 843 - DNA, 2217 bp, unidentified
  source 1..2217: mol_type = unassigned DNA; note = Adeno-associated virus
atggctgctgacggttatcttccagattggctcgaggacaacctctctgagggcattcgcgagtggtgggacctgaaacctggagcccccaagcccaaggccaaccagcagaagcaggacgacggccggggtctggtgcttcctggctacaagtacctcggacccttcaacggactcgacaagggggagcccgtcaacgcggcggacgcagcggccctcgagcacgacaaggcctacgaccagcagctcaaagcgggtgacaatccgtacctgcggtataatcacgccgacgccgagtttcaggagcgtctgcaagaagatacgtcttttgggggcaacctcgggcgagcagtcttccaggccaagaagcgggttctcgaacctctcggtctggttgaggaagctgctaagacggctcctggaaagaagagaccggtagaaccgtcacctcagcgttcccccgactcctccacgggcatcggcaagaaaggccagcagcccgctagaaagagactgaactttgggcagactggcgactcagagtcagtccccgaccctcaaccaatcggagaacctccagcagcgccctctagtgtgggatctggtacaatggccgcaggcggtggcgcaccaatggcagacaataacgaaggtgccgacggagtgggtagttcctcgggaaattggcattgcgattccacatggctgggcgacagagtcatcaccaccagcacccgaacctgggccctgcccacctacaacaaccacctctacaagcaaatctccaacgggacctcgggaggcagcaccaacgacaacacctactttggctacagcaccccctgggggtattttgactttaacagattccactgccacttctcaccacgtgactggcagcgactcatcaacaacaactggggattccggcccaagagactcagcttcaagctcttcaacatccaggtcaaagaggtcacgcagaatgaaggcaccaagaccatcgccaataacctcaccagcaccatccaggtgtttacggactcggaataccagctgccgtacgtcctcggctctgcccaccagggctgcctgcctccgttcccggcggacgtcttcatgattcctcagtacggctacctgactctcaacaacggtagtcaggccgtgggacgttcctccttctactgcctggagtacttcccctctcagatgctgagaacgggcaacaacttttccttcagctacactttcgaggacgtgcctttccacagcagctacgcgcacagccagagtttggacaggctgatgaatcctctcatcgaccagtacctgtactacctgtcaagaacccagtctacgggaggcacagcgggaacccagcagctgctgttttctcaggccgggcctagcaacatgtcggctcaggccagaaactggctgcctggaccctgctacagacagcagcgcgtctccacgacactgtcgcaaaacaacaacagcaactttgcctggactggtgccaccaagtatcatctgaacggcagagactctctggtgaatccgggcgtcgccatggcaaccaacaaggacgacgaggaccgcttcttcccatccagcggcatcctcatgtttggcaagcagggagctggaaaagacaacgtggactatagcaacgtgatgctaaccagcgaggaagaaatcaagaccaccaaccccgtggccacagaacagtatggcgtggtggctgataacctacagcagcaaaacaccgctcctattgtgggggccgtcaacagccagggagccttacctggcatggtctggcagaaccgggacgtgtacctgcagggtcctatttgggccaagattcctcacacagatggcaactttcacccgtctcctttaatgggcggctttggacttaaacatccgcctcctcagatcctcatcaaaagcactcctgttcctgcggatcctccaacagcgttcaaccaggccaagctgaattctttcatcacgcagtacagcaccggacaagtcagcgtggagatcgagtgggagctgcagaaggagaacagcaagtgctggaacccagagattcagtatacttccaactactacaaatctacaaatgtggactttgctgttaatactgagggtgtttactctgagcctcgccccattggcactcgttacctcacccgtaatctgtaa

SEQ ID NO: 844 - protein, 738 aa, unidentified
  source 1..738: note = Adeno-associated virus
MAADGYLPDWLEDNLSEGIREWWDLKPGAPKPKANQQKQDDGRGLVLPGYKYLGPFNGLDKGEPVNAADAAALEHDKAYDQQLKAGDNPYLRYNHADAEFQERLQEDTSFGGNLGRAVFQAKKRVLEPLGLVEEAAKTAPGKKRPVEPSPQRSPDSSTGIGKKGQQPARKRLNFGQTGDSESVPDPQPIGEPPAAPSSVGSGTMAAGGGAPMADNNEGADGVGSSSGNWHCDSTWLGDRVITTSTRTWALPTYNNHLYKQISNGTSGGSTNDNTYFGYSTPWGYFDFNRFHCHFSPRDWQRLINNNWGFRPKRLSFKLFNIQVKEVTQNEGTKTIANNLTSTIQVFTDSEYQLPYVLGSAHQGCLPPFPADVFMIPQYGYLTLNNGSQAVGRSSFYCLEYFPSQMLRTGNNFSFSYTFEDVPFHSSYAHSQSLDRLMNPLIDQYLYYLSRTQSTGGTAGTQQLLFSQAGPSNMSAQARNWLPGPCYRQQRVSTTLSQNNNSNFAWTGATKYHLNGRDSLVNPGVAMATNKDDEDRFFPSSGILMFGKQGAGKDNVDYSNVMLTSEEEIKTTNPVATEQYGVVADNLQQQNTAPIVGAVNSQGALPGMVWQNRDVYLQGPIWAKIPHTDGNFHPSPLMGGFGLKHPPPQILIKSTPVPADPPTAFNQAKLNSFITQYSTGQVSVEIEWELQKENSKCWNPEIQYTSNYYKSTNVDFAVNTEGVYSEPRPIGTRYLTRNL

SEQ ID NO: 845 - protein, 738 aa, unidentified
  source 1..738: note = Adeno-associated virus
MAADGYLPDWLEDNLSEGIREWWDLKPGAPKPKANQQKQDDGRGLVLPGYKYLGPFNGLDKGEPVNAADAAALEHDKAYDQQLKAGDNPYLRYNHADAEFQERLQEDTSFGGNLGRAVFQAKKRVLEPLGLVEEAAKTAPGKKRPVEPSPQRSPDSSTGIGKKGQQPARKRLNFGQTGDSESVPDPQPIGEPPAAPSSVGSGTMAAGGGAPMADNNEGADGVGSSSGNWHCDSTWLGDRVITTSTRTWALPTYNNHLYKQISNGTSGGSTNDNTYFGYSTPWGYFDFNRFHCHFSPRDWQRLINNNWGFRPKRLSFKLFNIQVKEVTQNEGTKTIANNLTSTIQVFTDSEYQLPYVLGSAHQGCLPPFPADVFMIPQYGYLTLNNGSQAVGRSSFYCLEYFPSQMLRTGNNFSFSYTFEDVPFHSSYAHSQSLDRLMNPLIDQYLYYLSRTQSTGGTAGTQQLLFSQAGPSNMSAQARNWLPGPCYRQQRVSTTLSQNNNSNFAWTGATKYHLNGRDSLVNPGVAMATNKDDEDRFFPSSGILMFGKQGAGKDNVDYSNVMLTSEEEIKTTNPVATEQYGVVADNLQQQNTAPIVGAVNSQGALPGMVWQNRDVYLQGPIWAKIPHTDGNFHPSPLMGGFGLKHPPPQILIKSTPVPADPPTAFNQAKLNSFITQYSTGQVSVEIEWELQKENSKRWNPEIQYTSNYYKSTNVDFAVNTEGVYSEPRPIGTRYLTRNL

SEQ ID NO: 846 - DNA, 2217 bp, unidentified
  source 1..2217: mol_type = unassigned DNA; note = Adeno-associated virus
atggctgctgacggttatcttccagattggctcgaggacaacctctctgagggcattcgcgagtggtgggacctgaaacctggagcccccaagcccaaggccaaccagcagaagcaggacgacggccggggtctggtgcttcctggctacaagtacctcggacccttcaacggactcgacaagggggagcccgtcaacgcggcggacgcagcggccctcgagcacgacaaggcctacgaccagcagctcaaagcgggtgacaatccgtacctgcggtataaccacgccgacgccgagtttcaggagcgtctgcaagaagatacgtcttttgggggcaacctcgggcgagcagtcttccaggccaagaagcgggttctcgaacctctcggtctggttgaggaagctgctaagacggctcctggaaagaagagaccggtagaaccgtcacctcagcgttcccccgactcctccacgggcatcggcaagaaaggccagcagcccgctagaaagagactgaactttgggcagactggcgactcagagtcagtccccgaccctcaaccaatcggagaaccaccagcaggcccctctggtctgggatctggtacaatggctgcaggcggtggcgcaccaatggctgacaataacgagggcgccgacggagtgggtaatgcctcaggaaattggcattgcgattccacatggctgggcgacagagtcatcaccaccagcacccgaacctgggctttgcccacctacaacaaccacctctacaagcaaatctccagtcagtcagcaggtagcaccaacgacaacgtctacttcggctacagcaccccctgggggtattttgacttcaacagattccactgtcacttctcaccacgtgactggcagcggctcatcaacaacaactggggattccggcccaagaagctcaacttcaagctgttcaacatccaggtcaaggaggtcacaacgaatgacggcgtcacgaccatcgccaataaccctaccagcacggttcaggtcttttcggactcggaataccagctgccctacgtcctcggctccgcacaccagggctgcctgcctccgttcccggcggacgtcttcatgattccccagtacggctacctgactctgaacaatggcagccaatcggtgggtcgttcctctttctactgcctggaatatttcccttctcaaatgctgagaacgggcaacaacttcaccttcagctacaccttcgaggacgttcccttccacagcagctacgcacacagccagagcctggaccggctgatgaatcctcttatcgaccagtacctgtattacctggccagaacacagagcaacgcaggaggcacagctggcaatcgggaactgcagttttatcagggcgggcctaccaccatggccgaacaagccaaaaactggctgcctggaccctgctacagacagcagcgcgtctccacgacactgtcgcaaaacaacaacagcaactttgcctggactggtgccaccaagtatcatctgaacggcagagactctctggtgaatccgggcgtcgccatggcaaccaacaaggacgacgaggaccgcttcttcccatccagcggcatcctcatgtttggcaagcagggagctggaaaagacaacgtggactatagcaacgtgatgctaaccagcgaggaagaaatcaagaccaccaaccccgtggccacagaacagtatggcgtggtggctgataacctacagcagcaaaacaccgctcctattgtgggggccgtcaacagccagggagccttacctggcatggtctggcagaaccgggacgtgtacctgcagggtcctatttgggccaagattcctcacacagatggcaactttcacccgtctcctttaatgggcggctttggacttaaacatccgcctcctcagatcctcatcaaaaacactcctgttcctgcggatcctccaacagcgttcaaccaggccaagctgaattctttcatcacgcagtacagcaccggacaagtcagcgtggagatcgagtgggagctgcagaaggagaacagcaagcgctggaacccagagattcagtatacttccaactactacaaatctacaaatgtggactttgctgttaatactgagggtgtttactctgagcctcgccccattggcactcgttacctcacccgtaatctgtaa

SEQ ID NO: 847 - protein, 738 aa, unidentified
  source 1..738: note = Adeno-associated virus
MAADGYLPDWLEDNLSEGIREWWDLKPGAPKPKANQQKQDDGRGLVLPGYKYLGPFNGLDKGEPVNAADAAALEHDKAYDQQLKAGDNPYLRYNHADAEFQERLQEDTSFGGNLGRAVFQAKKRVLEPLGLVEEAAKTAPGKKRPVEPSPQRSPDSSTGIGKKGQQPARKRLNFGQTGDSESVPDPQPIGEPPAGPSGLGSGTMAAGGGAPMADNNEGADGVGNASGNWHCDSTWLGDRVITTSTRTWALPTYNNHLYKQISSQSAGSTNDNVYFGYSTPWGYFDFNRFHCHFSPRDWQRLINNNWGFRPKKLNFKLFNIQVKEVTTNDGVTTIANNPTSTVQVFSDSEYQLPYVLGSAHQGCLPPFPADVFMIPQYGYLTLNNGSQSVGRSSFYCLEYFPSQMLRTGNNFTFSYTFEDVPFHSSYAHSQSLDRLMNPLIDQYLYYLARTQSNAGGTAGNRELQFYQGGPTTMAEQAKNWLPGPCYRQQRVSTTLSQNNNSNFAWTGATKYHLNGRDSLVNPGVAMATNKDDEDRFFPSSGILMFGKQGAGKDNVDYSNVMLTSEEEIKTTNPVATEQYGVVADNLQQQNTAPIVGAVNSQGALPGMVWQNRDVYLQGPIWAKIPHTDGNFHPSPLMGGFGLKHPPPQILIKNTPVPADPPTAFNQAKLNSFITQYSTGQVSVEIEWELQKENSKRWNPEIQYTSNYYKSTNVDFAVNTEGVYSEPRPIGTRYLTRNL

SEQ ID NO: 848 - DNA, 2208 bp, unidentified
  source 1..2208: mol_type = unassigned DNA; note = Adeno-associated virus
atggctgccgatggttatcttccagattggctcgaggacaacctctctgagggcattcacgagtggtgggacccgaaacctggagccccgaaacccaaagccaaccagcaaaagcaggacgacggccggggtctggtgcttcctggctacaagtacctcggacccttcaacggactcgacaagggggagcccgtcaacgcggcggacgcagcggccctcgagcacgacaaggcctacgaccagcagctcaaagcgggtgacaatccgtacctgcggtataatcacgccgacgccgagtttcaggagcgtctgcaagaagatacgtcttttgggggcaacctcgggcgagcagtcttccaggccaagaagcgggttctcgaacctctcggtctggttgaggaaggcgctaagacggctcctggaaagaagagaccggtagagccgtcaccacagcgttcccccgactcctccacgggcatcggcaagaaaggccagcagcccgccagaaagagactcaatttcggtcagactggcgactcagagtcagtccccgaccctcaacctatcggagaacctccagcagcgccctctagtgtgggatctggtacaatggctgcaggcggtggcgcaccaatggcagacaataacgaaggtgccgacggagtgggtagttcctcgggaaattggcattgcgattccacatggctgggcgacagagtcatcaccaccagcacccgaacctgggccctgcccacccacaacaaccacctctacaagcaaatctccaacgggacctcgggaggcagcaccaacgacaacgtctacttcggctacagcaccccctgggggtattttgacttcaacagattccactgtcacttctcaccacgtgaccggcagcgactcatcaacaacaactggggattccggcccaagagactcagcttcaagctcttcaacatccaggtcaaagaggtcacgcagaatgaaggcaccaagaccatcgccaataacctcaccagcaccatccaggtgtttacggactcggaataccagctgccgtacgtcctcggctctgcccaccagggctgcctgcctccgttcccggcggacgtcttcatgattcctcagtacggctacctgactctcaacaacggtagtcaggccgtgggacgttcctccttctactgcctggagtacttcccctctcagatgctgagaacgggcaacaacttttccttcagctacactttcgaggacgtgcctttccacagcagctacgcgcacagccagagtttggacaggctgatgaatcctctcatcgaccagtacctgtactacctgtcaagaacccagtctacggaaggcacagcgggaacccagcagttgctgttttctcaggccgggcctagcaacatgtcggctcaggccagaaactggctgcctggaccctgctacagacagcagcgcgtctccacgacactgtcgcaaaacaacaacagcaactttgcctggactggtgccaccaagtatcatctgaacggcagagactctctggtgaatccgggcgtcgccatggcaacccacaaggacgacgaggaacgcttcttcccttcgagcggagtcctgatttttggaaaaactggagcagctaataagactacactggaaaatgtgttaatgacaaatgaagaggaaattcgtcctaccaacccggtagccaccgaggaatacgggactgttagcagcaacctgcaggcggctaacactgcagcccagacacaagttgtcaacaaccagggagccttacctggtatggtctggcagaaccgggacgtgtacctgcagggtcccatctgggccaagattcctcacacggacggcaactttcacccgtctccgctgatgggcggctttggactgaagcatcctcagatcctgatcaaaaacactcctgttcctgctaatcccccggaggtgtttacgcctgccaagtttgcttctttcatcacacagtacagcaccggccaggtcagcgtggagatcgagtgggagctgcagaaggagaacagcaagcgctggaacccagagattcagtatacctccaattttgacaaacagactggtgtggactttgccgttgacagccagggtgtttattctgagcctcgccccattggtactcgttacctcacccgtaatctgtaa

SEQ ID NO: 849 - protein, 735 aa, unidentified
  source 1..735: note = Adeno-associated virus
MAADGYLPDWLEDNLSEGIHEWWDPKPGAPKPKANQQKQDDGRGLVLPGYKYLGPFNGLDKGEPVNAADAAALEHDKAYDQQLKAGDNPYLRYNHADAEFQERLQEDTSFGGNLGRAVFQAKKRVLEPLGLVEEGAKTAPGKKRPVEPSPQRSPDSSTGIGKKGQQPARKRLNFGQTGDSESVPDPQPIGEPPAAPSSVGSGTMAAGGGAPMADNNEGADGVGSSSGNWHCDSTWLGDRVITTSTRTWALPTHNNHLYKQISNGTSGGSTNDNVYFGYSTPWGYFDFNRFHCHFSPRDRQRLINNNWGFRPKRLSFKLFNIQVKEVTQNEGTKTIANNLTSTIQVFTDSEYQLPYVLGSAHQGCLPPFPADVFMIPQYGYLTLNNGSQAVGRSSFYCLEYFPSQMLRTGNNFSFSYTFEDVPFHSSYAHSQSLDRLMNPLIDQYLYYLSRTQSTEGTAGTQQLLFSQAGPSNMSAQARNWLPGPCYRQQRVSTTLSQNNNSNFAWTGATKYHLNGRDSLVNPGVAMATHKDDEERFFPSSGVLIFGKTGAANKTTLENVLMTNEEEIRPTNPVATEEYGTVSSNLQAANTAAQTQVVNNQGALPGMVWQNRDVYLQGPIWAKIPHTDGNFHPSPLMGGFGLKHPQILIKNTPVPANPPEVFTPAKFASFITQYSTGQVSVEIEWELQKENSKRWNPEIQYTSNFDKQTGVDFAVDSQGVYSEPRPIGTRYLTRNL

SEQ ID NO: 850 - protein, 738 aa, unidentified
  source 1..738: note = Adeno-associated virus
MAADGYLPDWLEDNLSEGIREWWDLKPGAPKPKANQQKQDDGRGLVLPGYKYLGPFNGLDKGEPVNAADAAALEHDKAYDQQLKAGDNPYLRYNHADAEFQERLQEDTSFGGNLGRAVFQAKKRVLEPLGLVEEGAKTAPGKKRPVEPSPQRSPDSSTGIGKKGQQPARKRLNFGQTGDSESVPDPQPIGEPPAAPSSVGSGTMAAGGGAPMADNNEGADGVGSSSGNWHCDSTWLGDRVITTSTRTWALPTYNNHLYKQISNGTSGGSTNDNTYFGYSTPWGYFDFNRFHCHFSPRDWQRPINNNWGFRPKRLSFKLFNIQVKEVTQNEGTKTIANNLTSTIQVFTDSEYQLPYVLGSAHQGCLPPFPADVFMIPQYGYLTLNNGSQAVGRSSFYCLEYFPSQMLRTGNNFSFSYPFEDVPFHSSYAHSQSLDRLMNPLIDQYLYYLSRTQSTGGTAGTQQLLFSQAGPSNMSAQARNWLPGPCYRQQRVSTTLSQNNNSNFAWTGATKYHLNGRDSLVNPGVAMATNKDDEDRFFPSSGILMFGKQGAGKDNVDYSNVMLTSEEEIKTTNPVATEQYGVVADNLQQQDTAPIVGAVNSQGALPGMVWQNRDVYLQGPIWAKIPHTDGNFHPSPLMGGFGLKHPPPQVLIKNTPVPADPPTAFNQAKLNSFITQYSTGQVSVEIEWELQKENSKRWNPEIQYTSNYYKSTNVDFAVNTEGVYSEPRPIGTRYLTRNL

SEQ ID NO: 851 - DNA, 2217 bp, unidentified
  source 1..2217: mol_type = unassigned DNA; note = Adeno-associated virus
atggctgccgatggttatcttccagattggctcgaggacaacctctctgagggcattcgcgagtggtgggacctgaaacctggagccccgaaacccaaggccaaccagcaaaagcaggacgacggccggggtctggtgcttcctggctacaagtacctcggacccttcaacggactcgacaagggggagcccgtcaacgcggcggacgcagcggccctcgagcacgacaaggcctacgaccagcagctcaaagcgggtgacaatccgtacctgcggtataatcacgccgacgccgagtttcaggagcgtctgcaagaagatacgtcttttgggggcaacctcgggcgagcagtcttccaggccaagaagcgggttctcgaacctctcggtctggttgaggaaggcgctaagacggctcctggaaagaagagaccggtagagccgtcaccacagcgttcccccgactcctccacgggcatcggcaagaaaggccagcagcccgccagaaagagactcaatttcggtcagactggcgactcagagtcagtccccgaccctcaacctatcggagaacctccagcagcgccctctagtgtgggatctggtacaatggctgcaggcggtggcgcaccaatggcagacaataacgaaggtgccgacggagtgggtagttcctcgggaaattggcattgcgattccacatggctgggcgacagagtcatcaccaccagcacccgaacctgggccctgcccacctacaacaaccacctctacaagcaaatctccaacgggacctcgggaggcagcaccaacgacaacacctactttggctacagcaccccctgggggtattttgactttaacagattccactgccacttctcaccacgtgactggcagcgacccatcaacaacaactggggattccggcccaagagactcagcttcaagctcttcaacatccaggtcaaagaggtcacgcagaatgaaggcaccaagaccatcgccaataacctcaccagcaccatccaggtgtttacggactcggaataccagctgccgtacgtcctcggctctgcccaccagggctgcctgcctccgttcccggcggacgtcttcatgattcctcagtacggctacctgactctcaacaacggtagtcaggccgtgggacgttcctccttctactgcctggagtacttcccctctcagatgctgagaacgggcaacaacttttccttcagctaccctttcgaggacgtgcctttccacagcagctacgcgcacagccagagtttggacaggctgatgaatcctctcatcgaccagtacctgtactacctgtcaagaacccagtctacgggaggcacagcgggaacccagcagttgctgttttctcaggccgggcctagcaacatgtcggctcaggccagaaactggctgcctggaccctgctacagacagcagcgcgtctccacgacactgtcgcaaaacaacaacagcaactttgcctggactggtgccaccaagtatcatctgaacggcagagactctctggtgaatccgggcgtcgccatggcaaccaacaaggacgacgaggaccgcttcttcccatccagcggcatcctcatgtttggcaagcagggagctggaaaagacaacgtggactatagcaacgtgatgctaaccagcgaggaagaaatcaagaccaccaaccccgtggccacagaacagtatggcgtggtggctgataacctacagcagcaagacaccgctcctattgtgggggccgtcaacagccagggagccttacctggcatggtctggcagaaccgggacgtgtacctgcagggtcctatttgggccaagattcctcacacagatggcaactttcacccgtctcctttaatgggcggctttggacttaaacatccgcctcctcaggtcctcatcaaaaacactcctgttcctgcggatcctccaacagcgttcaaccaggccaagctgaattctttcatcacgcagtacagcaccggacaagtcagcgtggagatcgagtgggagctgcagaaggagaacagcaagcgctggaacccagagattcagtatacttccaactactacaaatctacaaatgtggactttgctgttaatactgagggtgtttactctgagcctcgccccattggcactcgttacctcacccgtaatctgtaa

SEQ ID NO: 852 - DNA, 2214 bp, unidentified
  source 1..2214: mol_type = unassigned DNA; note = Adeno-associated virus
atggctgctgacggttatcttccagattggctcgaggacaacctctctgagggcattcgcgagtggtgggacctgaaacctggagcccccaagcccaaggccaaccagcagaagcaggacgacggccggggtctggtgcttcctggctacaagtacctcggacccttcaacggactcgacaagggggagcccgtcaacgcggcggacgcagcggccctcgagcacgacaaggcctacgaccagcagctcaaagcgggtgacaatccgtacctgcggtataaccacgccgacgccgagttccaggagcgtctgcaagaagatacgtcttttgggggcaacctcgggcgagcagtcttccaggccaagaagcgggttctcgaacctctcggtctggctgaggaagctgctaagacggctcctggaaagaagagaccggtagaaccgtcacctcagcgttcccccgactcctccacgggcatcggcaagaaaggccagcagcccgctagaaagagactgaactttgggcagactggcgactcagagtcagtccccgaccctcaaccaatcggagagccaccagcaggcccctctggtctgggatctggtacaatggctgcaggcggtggcgcaccaatggctgacaataacaagggcgccgacggagtgggtaatgcctcaggaaattggcattgcgattccacatggctgggcgacagagtcatcaccaccagcacccgaacctgggctttgcccacctacaacaaccacctctacaagcaaatctccagtcagtcagcaggtagcaccaacgacaacgtctacttcggctacagcaccccctgggggtattttgacttcaacagattccactgtcacttctcaccacgtgactggcagcggctcatcaacaacaactggggattccggcccaagaagctcaacttcaagctgttcaacatccaggtcaaggaggtcacaacgggtgacggcgtcacgaccatcgccaataaccttaccagcacggttcaggtcttttcggactcggaataccagctgccctacgtcctcggctccgcacaccagggctgcctgcctccgttcccggcggacgtcttcatgattccccagtacggctacctgactctgaacaatgacagccaatcggtgggtcgttcctctttctactgcctggaatatttcccttctcaaatgctgagaacgggcaacaacttcaccttcagctacaccttcgaggacgttcccttccacagcagctacgcacacagccagagcctggaccggctgatgaatcctcttatcgaccagtacctgtattacctggccagaacacagagcaacgcaggaggcacagctggcaatcgggaactgcagttttatcagggcgggcctaccaccatggccgaacaagccaaaaactggctgcctggaccttgcttccggcaacaaagagtctccaagacgctggatcaaaacaacaacagcaactttgcttggactggtgccaccaaataccatctaaatggaagaaattcattggttaatcccggtgtcgccatggcaacccacaaggacgacgaggaacgcttcttcccttcgagcggagtcctgatttttggaaaaactggagcagctaataagactacactggaaaatgtgttaatgacaaatgaagaggaaattcgtcctaccaacccggtagccaccgaggaatacgggactgttagcagcaacctgcaggcggctaacactgcagcccagacacaagttgtcaacaaccagggagccttacctggtatggtctggcagaaccgggacgtgtacctgcagggtcccatctgggccaagattcctcacacggacggcaactttcacccgtctccgctgatgggcggctttggactgaagcatccgcctcctcagatcctgatcaaaaacactcctgttcctgctaatcccccggaggtgtttacgcctgccaagtttgcttctttcatcacacagtacagcaccggccaggtcagcgtggagatcgagtgggagctgcagaaggagaacagcaagcgctggaacccagagattcagtatacctccaattttgacaaacagactggtgtggactttgccgttgacagccagggtgtttattctgagcctcgccccattggtactcgttacctcacccgtaatctgtaa

SEQ ID NO: 853 - protein, 737 aa, unidentified
  source 1..737: note = Adeno-associated virus
MAADGYLPDWLEDNLSEGIREWWDLKPGAPKPKANQQKQDDGRGLVLPGYKYLGPFNGLDKGEPVNAADAAALEHDKAYDQQLKAGDNPYLRYNHADAEFQERLQEDTSFGGNLGRAVFQAKKRVLEPLGLAEEAAKTAPGKKRPVEPSPQRSPDSSTGIGKKGQQPARKRLNFGQTGDSESVPDPQPIGEPPAGPSGLGSGTMAAGGGAPMADNNKGADGVGNASGNWHCDSTWLGDRVITTSTRTWALPTYNNHLYKQISSQSAGSTNDNVYFGYSTPWGYFDFNRFHCHFSPRDWQRLINNNWGFRPKKLNFKLFNIQVKEVTTGDGVTTIANNLTSTVQVFSDSEYQLPYVLGSAHQGCLPPFPADVFMIPQYGYLTLNNDSQSVGRSSFYCLEYFPSQMLRTGNNFTFSYTFEDVPFHSSYAHSQSLDRLMNPLIDQYLYYLARTQSNAGGTAGNRELQFYQGGPTTMAEQAKNWLPGPCFRQQRVSKTLDQNNNSNFAWTGATKYHLNGRNSLVNPGVAMATHKDDEERFFPSSGVLIFGKTGAANKTTLENVLMTNEEEIRPTNPVATEEYGTVSSNLQAANTAAQTQVVNNQGALPGMVWQNRDVYLQGPIWAKIPHTDGNFHPSPLMGGFGLKHPPPQILIKNTPVPANPPEVFTPAKFASFITQYSTGQVSVEIEWELQKENSKRWNPEIQYTSNFDKQTGVDFAVDSQGVYSEPRPIGTRYLTRNL

SEQ ID NO: 854 - DNA, 2217 bp, unidentified
  source 1..2217: mol_type = unassigned DNA; note = Adeno-associated virus
atggctgccgatggttatcttccagattggctcgaggacaacctctctgagggcattcgcgagtggtgggacctgaaacctggagccccgaaacccaaagccaaccagcaaaagcaggacgacggccggggtctggtgcttcctggctacaagtacctcggacccttcaacggactcgacaagggggagcccgtcaacgcggcggacgcagcggccctcgagcacgacaaggcctacgaccagcagctcaaagcgggtgacaatccgtacctgcggtataatcacgccgacgccgagtttcaggagcgtctgcaagaagatacgtcttttgggggcaacctcgggcgagcagtcttccaggccaagaagcgggttctcgaacctctcggtctggttgaggaaggcgctaagacggctcctggaaagaagagaccggtagagccgtcaccacagcgttcccccgactcctccacgggcatcggcaagaaaggccagcagcccgccagaaagagactcaatttcggtcagactggcgactcagagtcagtccccgaccctcaacctatcggagaacctccagcagcgccctctagtgtgggatctggtacaatggctgcaggcggtggcgcaccaatggcagacaataacgaaggtgccgacggagtgggtagttcctcgggaaattggcattgcgattccacatggctgggcgacagagtcatcaccaccagcacccgaacctgggccctgcccacctacaacaaccacctctacaagcaaatctccaacgggacctcgggaggcagcaccaacgacaacacctactttggctacagcaccccctgggggtattttgactttaacagattccactgccacttctcaccacgtgactggcagcgactcatcaacaacaactggggattccggcccaagagactcagcttcaagctcttcaacatccaggtcaaagaggtcacgcagaatgaaggcaccaagaccatcgccaataacctcaccagcaccatccaggtgtttacggactcggaataccagctgccgtacgtcctcggctctgcccaccagggctgcctgcctccgttcccggcggacgtcttcatgattcctcagtacggctacctgactctcaacaacggtagtcaggccgtgggacgttcctccttctactgcctggagtacttcccctctcagatgctgagaacgggcaacaacttttccttcagctacactttcgaggacgtgcctttccacagcagctacgcgcacagccagagtttggacaggctgatgaatcctctcatcgaccagtacctgtactacctgtcaagaacccagtctacgggaggcacagcgggaacccagcagttgctgttttctcaggccgggcctagcaacatgtcggctcaggccagaaactggctgcctggaccctgctacagacagcagcgcgtctccacgacactgtcgcaaaacaacaacagcaactttgcctggactggtgccaccaagtatcatctgaacggcagagactctctggtgaatccgggcgtcgccatggcaaccaacaaggacgacgaggaccgcttcttcccatccagcggcatcctcatgtttggcaagcagggagctggaaaagacaacgtggactatagcaacgtgatgctaaccagcgaggaagaaatcaagaccaccaaccccgtggccacagaacagtatggcgtggtggctgataacctacagcagcaaaacaccgctcctattgtgggggccgtcaacagccagggagccttacctggcatggtctggcagaaccgggacgtgtacctgcagggtcctatttgggccaagattcctcacacagatggcaactttcacccgtctcctttaatgggcggctttggacttaaacatccgcctcctcagatcctcatcaaaaacactcctgttcctgcggatcctccaacagcgttcaaccaggccaagctgaattctttcatcacgcagtacagcaccggacaagtcagcgtggagatcgtgtgggagctgcagaaggagaacagcaagcgcaggaacccagagattcagtatacttccaactactacaaatctacaaatgtggactttgctgttaatactgagggtgtttactctgagcctcgccccattggcactcgttacctcacccgtaatctgtaa

SEQ ID NO: 855 - protein, 738 aa, unidentified
  source 1..738: note = Adeno-associated virus
MAADGYLPDWLEDNLSEGIREWWDLKPGAPKPKANQQKQDDGRGLVLPGYKYLGPFNGLDKGEPVNAADAAALEHDKAYDQQLKAGDNPYLRYNHADAEFQERLQEDTSFGGNLGRAVFQAKKRVLEPLGLVEEGAKTAPGKKRPVEPSPQRSPDSSTGIGKKGQQPARKRLNFGQTGDSESVPDPQPIGEPPAAPSSVGSGTMAAGGGAPMADNNEGADGVGSSSGNWHCDSTWLGDRVITTSTRTWALPTYNNHLYKQISNGTSGGSTNDNTYFGYSTPWGYFDFNRFHCHFSPRDWQRLINNNWGFRPKRLSFKLFNIQVKEVTQNEGTKTIANNLTSTIQVFTDSEYQLPYVLGSAHQGCLPPFPADVFMIPQYGYLTLNNGSQAVGRSSFYCLEYFPSQMLRTGNNFSFSYTFEDVPFHSSYAHSQSLDRLMNPLIDQYLYYLSRTQSTGGTAGTQQLLFSQAGPSNMSAQARNWLPGPCYRQQRVSTTLSQNNNSNFAWTGATKYHLNGRDSLVNPGVAMATNKDDEDRFFPSSGILMFGKQGAGKDNVDYSNVMLTSEEEIKTTNPVATEQYGVVADNLQQQNTAPIVGAVNSQGALPGMVWQNRDVYLQGPIWAKIPHTDGNFHPSPLMGGFGLKHPPPQILIKNTPVPADPPTAFNQAKLNSFITQYSTGQVSVEIVWELQKENSKRRNPEIQYTSNYYKSTNVDFAVNTEGVYSEPRPIGTRYLTRNL

SEQ ID NO: 856 - protein, 738 aa, unidentified
  source 1..738: note = Adeno-associated virus
MAADGYLPDWLEDNLSEGIREWWDLKPGAPKPKANQQKQDDGRGLVLPGYKYLGPFNGLDKGEPVNAADAAALEHDKAYDQQLKAGDNPYLRYNHADAEFQERLQEDTSFGGNLGRAVFQAKKRVLEPLGLVEEGAKTAPGKKRPVEPSPQRSPDSSTGIGKKGQQPARKRLNFGQTGDSESVPDPQPIGEPPAAPSSVGSGTMAAGGGAPMADNNEGADGVGSSSGNWHCDSTWLGDRVITTSTRTWALPTYNNHLYKQISNGTSGGSTNDNTYFGYSTPWGYFDFNRFHCHFSPRDWQRLINNNWGFRPKRLSFKLFNIQVKEVTQNEGTKTIANNLTSTIQVFTDSEYQLPYVLGSAHQGCLPPFPADVFMIPQYGYLTLNNGSQAVGRSSFYCLEYFPSQMLRTGNNFSFSYTFEDVPFHSSYAHSQSLDRLMNPLIDQYLYYLSRTQSTGGTAGTQQLLFSQAGPSNMSAQARNWLPGPCYRQQRVSTTLSQNNNSNFAWTGATKYHLNGRDSLVNPGVAMATNKDDEDRFFPSSGILMFGKQGAGKDNVDYSNVMLTSEEEIKTTNPVATEQYGVVADNLQQQNTAPIVGAVNSQGALPGMVWQNRDVYLQGPIWAKIPHTDGNFHPSPLMGGFGLKHPPPQILIKNTPVPADPPTAFNQAKLNSFITQYSTGQVSVEIEWELQKENSKRWNPEIQYTSNYYKSTNVDFAVNTEGVYSEPRPIGTRYLTRNL

SEQ ID NO: 857 - protein, 738 aa, unidentified
  source 1..738: note = Adeno-associated virus
MAADGYLPDWLEDNLSEGIREWWDLKPGAPKPKANQQKQDDGRGLVLPGYKYLGPFNGLDKGEPVNAADAAALEHDKAYDQQLKAGDNPYLRYNHADAEFQERLQEDTSFGGNLGRAVFQAKKRVLEPLGLVEEGAKTAPGKKRPVEPSPQRSPDSSTGIGKKGQQPARKRLNFGQTGDSESVPDPQPIGEPPAAPSSVGSGTMAAGGGAPMADNNEGADGVGSSSGNWHCDSTWLGDRVITTSTRTWALPTYNNHLYKQISNGTSGGSTNDNTYFGYSTPWGYFDFNRFHCHFSPRDWQRLINNNWGFRPKRLSFKLFNIQVKEVTQNEGTKTIANNLTSTIQVFTDSEYQLPYVLGSAHQGCLPPFPADVFMIPQYGYLTLNNGSQAVGRSSFYCLEYFPSQMLRTGNNFSFSYTFEDVPFHSSYAHSQSLDRLMNPLIDQYLYYLSRTQSTGGTAGTQQLLFSQAGPSNMSAQARNWLPGPCYRQQRVSTTLSQNNNSNFAWTGATKYHLNGRDSLVNPGVAMATNKDDEDRFFPSSGILMFGKQGAGKDNVDYSNVMLTSEEEIKTTNPVATEQYGVVADNLQQQNTAPIVGAVNSQGALPGMVWQNRDVYLQGPIWAKIPHTDGNFHPSPLMGGFGLKHPPPQILIKNTPVPADPPTAFNQAKLNSFITQYSTGQVSVEIVWELQKENSKRWNPEIQYTSNYYKSTNVDFAVNTEGVYSEPRPIGTRYLTRNL

SEQ ID NO: 858 - protein, 738 aa, unidentified; identical to SEQ ID NO: 856
  source 1..738: note = Adeno-associated virus

SEQ ID NO: 859 - DNA, 2214 bp, unidentified
  source 1..2214: mol_type = unassigned DNA; note = Adeno-associated virus
atggctgctgacggttatcttccagattggctcgaggacaacctctctgagggcattcgcgagtggtgggacctgaaacctggagcccccaagcccaaggccaaccagcagaagcaggacgacggccggggtctggtgcttcctggctacaagtacctcggacccttcaacggactcgacaagggggagcccgtcaacgcggcggacgcagcggccctcgagcacgacaaggcctacgaccagcagctcaaagcgggtgacaatccgtacctgcggtataaccacgccgacgccgagtttcaggagcgtctgcaagaagatacgtcttttgggggcaacctcgggcgagcagtcttccaggccaagaagcgggttctcgaacctctcggtctggttgaggaagctgctaagacggctcctggaaagaagagaccggtagaaccgtcacctcagcgttcccccgactcctccacgggcatcggcaagaaaggccagcagcccgctagaaagagactgaactttgggcagactggcgactcagagtcagtccccgaccctcaaccaatcggagaaccaccagcaggcccctctggtctgggatctggtacaatggctgcaggcggtggcgctccaatggcagacaataacgaaggcgccgacggagtgggtaatgcctcaggaaattggcattgcgattccacatggctgggcgacagagtcatcaccaccagcacccgaacctgggctttgcccacctacaacaaccacctctacaagcaaatctccagtcagtcagcaggtagcaccaacgacaacgtctacttcggctacagcaccccctgggggtattttgacttcaacagattccactgtcacttctcaccacgtgactggcagcggctcatcaacaacaactggggattccggcccaagaagctcaacttcaagctgttcaacatccaggtcaaggaggtcacaacgaatgacggcgtcacgaccatcgccaataaccttaccagcacggttcaggtcttttcggactcggaataccagctgccctacgtcctcggctccgcacaccagggctgcctgcctccgttcccggcggacgtcttcatgattccccagtacggctacctgactctgaacaatggcagccaatcggtgggtcgttcctctttctactgcctggaatatttcccttctcaaatgctgagaacgggcaacaacttcaccttcagctacaccttcgaggacgttcccttccacagcagctacgcacacagccagagcctggaccggctgatgaatcctcttatcgaccagtacctgtattacctggccagaacacagagcaacgcaggaggcacagctggcaatcgggaactgcagttttatcagggcgggcctaccaccatggccgaacaagccaaaaactggctgcctagaccttgcttccggcaacaaagagtctccaagacgctggatcaaaacaacaacagcaactttgcttggactggtgccaccaaataccatctaaatggaagaaattcattggttaatcccggtgtcgccatggcaacccacaaggacgacgaggaacgcttcttcccttcgagcggagtcctgatttttggaaaaactggagcagctaataagactacactggaaaatgtgttaatgacaaatgaagaggaaattcgtcctaccaacccggtagccaccgaggaatacgggactgttagcagcaacctgcaggcggctaacactgcagcccagacacaagttgtcaacaaccagggagccttacctggtatggtctggcagaaccgggacgtgtacctgcagggtcccatctgggccaagattcctcacacggacggcaactttcacccgtctccgctgatgggcggctttggactgaagcatccgcctcctcagatcctgatcaaaaacactcctgttcctgctaatcccccggaggtgtttacgcctgccaagtttgcttctttcatcacacagtacagcaccggccaggtcagcgtggagatcgagtgggagctgcagaaggagaacagcaagcgctggaacccagagattcagtatacctccaattttgacaaacagactggtgtggactttgccgttgacagccagggtgtttattctgagcctcgccccattggtactcgttacctcacccgtaatctgtaa

SEQ ID NO: 860 - protein, 737 aa, unidentified
  source 1..737: note = Adeno-associated virus
MAADGYLPDWLEDNLSEGIREWWDLKPGAPKPKANQQKQDDGRGLVLPGYKYLGPFNGLDKGEPVNAADAAALEHDKAYDQQLKAGDNPYLRYNHADAEFQERLQEDTSFGGNLGRAVFQAKKRVLEPLGLVEEAAKTAPGKKRPVEPSPQRSPDSSTGIGKKGQQPARKRLNFGQTGDSESVPDPQPIGEPPAGPSGLGSGTMAAGGGAPMADNNEGADGVGNASGNWHCDSTWLGDRVITTSTRTWALPTYNNHLYKQISSQSAGSTNDNVYFGYSTPWGYFDFNRFHCHFSPRDWQRLINNNWGFRPKKLNFKLFNIQVKEVTTNDGVTTIANNLTSTVQVFSDSEYQLPYVLGSAHQGCLPPFPADVFMIPQYGYLTLNNGSQSVGRSSFYCLEYFPSQMLRTGNNFTFSYTFEDVPFHSSYAHSQSLDRLMNPLIDQYLYYLARTQSNAGGTAGNRELQFYQGGPTTMAEQAKNWLPRPCFRQQRVSKTLDQNNNSNFAWTGATKYHLNGRNSLVNPGVAMATHKDDEERFFPSSGVLIFGKTGAANKTTLENVLMTNEEEIRPTNPVATEEYGTVSSNLQAANTAAQTQVVNNQGALPGMVWQNRDVYLQGPIWAKIPHTDGNFHPSPLMGGFGLKHPPPQILIKNTPVPANPPEVFTPAKFASFITQYSTGQVSVEIEWELQKENSKRWNPEIQYTSNFDKQTGVDFAVDSQGVYSEPRPIGTRYLTRNL

SEQ ID NO: 861 - DNA, 2214 bp, unidentified
  source 1..2214: mol_type = unassigned DNA; note = Adeno-associated virus
atggctgctgacggttatcttccagattggctcgaggacaacctctctgagggcattcgcgagtggtgggacctgaaacctggagcccccaagcccaaggccaaccagcagaagcaggacgacggccggggtctggtgcttcctggctacaagtacctcggacccttcaacggactcgacaagggggagcccgtcaacgcggcggacgcagcggccctcgagcacgacaaggcctacgaccagcagctcaaagcgggtgacaatccgtacctgcggtataaccatgccgacgccgagtttcaggagcgtctgcaagaagatacgtcttttgggggcaacctcgggcgagcagtcctccaggccaagaagcgggttctcgaacctctcggtctggttgaggaagctgctaagacggctcctggaaagaagagaccggtagaaccgtcacctcagcgttcccccgactcctccacgggcatcggcaagaaaggccagcagcccgctagaaagagactgaactttgggcagactggcgactcagagtcagtccccgaccctcaaccaatcggagaaccaccagcaggcccctctggtctgggatctggtacaatggctgcaggcggtggcgctccaatggcagacaataacgaaggcgccgacggagtgggtaatgcctcaggaaattggcattgcgattccacatggctgggcgacagagtcatcaccaccagcacccgaacctgggctttgcccacctacaacaaccacctctacaagcaaatctccagtcagtcagcaggtagcaccaacgacaacgtctacttcggctacagcaccccctgggggtattttgacttcaacagattccactgtcacttctcaccacgtgactggcagcggctcatcaacaacaactggggattccggcccaagaagctcaacttcaagctgttcaacatccaggtcaaggaggtcacaacgaatgacggcgtcacgaccatcgccaataaccttaccagcacggttcaggtcttttcggactcggaataccagctgccctacgtcctcggctccgcacaccagggctgcctgcctccgttcccggcggacgtcttcatgattccccagtacggctacctgactctgaacaatggcagccaatcggtgggtcgttcctctttctactgcctggaatatttcccttctcaaatgctgagaacgggcaacaacttcaccttcagctacaccttcgaggacgttcccttccacagcagctacgcacacagccagagcctggaccggctgatgaatcctcttatcgaccagtacctgtattacctggccagaacacagagcaacgcaggaggcacagctggcaatcgggaactgcagttttatcagggcgggcctaccaccatggccgaacaagccaaaaactggctgcctggaccttgcttccggcaacaaagagtctccaagacgctggatcaaaacaacaacagcaactttgcttggactggtgccaccaaataccatctaaatggaagaaattcattggttaatcccggtgtcgccatggcaacccacaaggacgacgaggaacgcttcttcccttcgagcggagtcctgatttttggaaaaactggagcagctaataagactacactggaaaatgtgttaatgacaaatgaagaggaaattcgtcctaccaacccggtagccaccgaggaatacgggactgttagcagcaacctgcaggcggctaacactgcagcccagacacaagttgtcaacaaccagggagccttacctggtatggtctggcagaaccgggacgtgtacctgcagggtcccatctgggccaagattcctcacacggacggcaactttcacccgtctccgctgatgggcggctttggactgaagcatccgcctcctcagatcctgatcaaaaacactcctgttcctgctaatcccccggaggtgtttacgcctgccaagtttgcttctttcatcacacagtacagcaccggccaggtcagcgtggagatcgagtgggagctgcagaaggagaacagcaagcgctggaacccagagattcagtatacctccaattttgacaaacagactggtgtggactttgccgttgacagccagggtgtttattctgagcctcgccccattggtactcgttacctcacccgtaatctgtaa

SEQ ID NO: 862 - protein, 737 aa, unidentified; identical to SEQ ID NO: 821
  source 1..737: note = Adeno-associated virus

SEQ ID NO: 863 - protein, 737 aa, unidentified
  source 1..737: note = Adeno-associated virus
MAADGYLPDWLEDNLSEGIREWWDLKPGAPKPKANQQKQDDGRGLVLPGYKYLGPFNGLDKGEPVNAADAAALEHDKAYDQQLKAGDNPYLRYNHADAEFQERLQEDTSFGGNLGRAVLQAKKRVLEPLGLVEEAAKTAPGKKRPVEPSPQRSPDSSTGIGKKGQQPARKRLNFGQTGDSESVPDPQPIGEPPAGPSGLGSGTMAAGGGAPMADNNEGADGVGNASGNWHCDSTWLGDRVITTSTRTWALPTYNNHLYKQISSQSAGSTNDNVYFGYSTPWGYFDFNRFHCHFSPRDWQRLINNNWGFRPKKLNFKLFNIQVKEVTTNDGVTTIANNLTSTVQVFSDSEYQLPYVLGSAHQGCLPPFPADVFMIPQYGYLTLNNGSQSVGRSSFYCLEYFPSQMLRTGNNFTFSYTFEDVPFHSSYAHSQSLDRLMNPLIDQYLYYLARTQSNAGGTAGNRELQFYQGGPTTMAEQAKNWLPGPCFRQQRVSKTLDQNNNSNFAWTGATKYHLNGRNSLVNPGVAMATHKDDEERFFPSSGVLIFGKTGAANKTTLENVLMTNEEEIRPTNPVATEEYGTVSSNLQAANTAAQTQVVNNQGALPGMVWQNRDVYLQGPIWAKIPHTDGNFHPSPLMGGFGLKHPPPQILIKNTPVPANPPEVFTPAKFASFITQYSTGQVSVEIEWELQKENSKRWNPEIQYTSNFDKQTGVDFAVDSQGVYSEPRPIGTRYLTRNL

SEQ ID NO: 864 - DNA, 2217 bp, unidentified
  source 1..2217: mol_type = unassigned DNA; note = Adeno-associated virus
atggctgccgatggttatcttccagattggctcgaggacaacctctctgagggcattcgcgagtggtgggacctgaaacctggagccccgaaacccaaagccaaccagcaaaagcaggacgacggccggggtctggtgcttcctggctacaagtacctcggacccttcaacggactcgacaagggggagcccgtcaacgcggcggacgcagcggccctcgagcacgacaaggcctacgaccagcagctcaaagcgggtgacaatccgtacctgcggtataatcacgccgacgccgagtttcaggagcgtctgcaagaagatacgtcttttgggggcaacctcgggcgagcagtcttccaggccaagaagcgggttctcgaacctctcggtctggttgaggaaggcgctaagacggctcctggaaagaagagaccggtagagccgtcaccacagcgttcccccgactcctccacgggcatcggcaagaaaggccagcagcccgccagaaagagactcaatttcggtcagactggcgactcagagtcagtccccgaccctcaacctatcggagaacctccagcagcgccctctagtgtgggatctggtacaatggctgcaggcggtggcgcaccaatggcagacaataacgaaggtgccgacggagtgggtagttcctcgggaaattggcattgcgattccacatggctgggcgacagagtcatcaccaccagcacccgaacctgggccctgcccacctacaacaaccacctctacaagcaaatctccaacgggacctcgggaggcagcaccaacgacaacacctactttggctacagcaccccctgggggtattttgactttaacagattccactgccacttctcaccacgtgactggcagcgactcatcaacaacaactggggattccggcccaagagactcagcttcaagctcttcaacatccaggtcaaagaggtcacgcagaatgaaggcaccaagaccatcgccaataacctcaccagcaccatccaggtgtttacggactcggaataccagctgccgtacgtcctcggctctgcccaccagggctgcctgcctccgttcccggcggacgtcttcatgattcctcagtacggctacctgactctcaacaacggtagtcaggccgtgggacgttcctccttctactgcctggagtacttcccctctcagatgctgagaacgggcaacaacttttccttcagctacactttcgaggacgtgcctttccacagcagctacgcgcacagccagagtttggacaggctgatgaatcctctcatcgaccagtacctgtactacctgtcaagaacccagtctacgggaggcacagcgggaacccagcagttgctgttttctcaggccgggcctagcaacatgtcggctcaggccagaaactggctgcctggaccctgctacagacagcagcgcgtctccacgacactgtcgcaaaacaacaacagcaactttgcctggactggtgccaccaagtatcatctgaacggcagagactctctggtgaatccgggcgtcgccatggcaaccaacaaggacgacgaggaccgcttcttcccacccagcggcatcctcatgtttggcaagcagggagctggaaaagacaacgtggactatagcaacgtgatgctaaccagcgaggaagaaatcaagaccaccaaccccgtggccacagaacagtatggcgtggtggctgataacctacagcagcaaaacaccgctcctattgtgggggccgtcaacagccagggagccttacctggcatggtctggcagaaccgggacgtgtacctgcagggtcctatttgggccaagattcctcacacagatggcaactttcacccgtctcctttaatgggcggctttggacttaaacatccgcctcctcagatcctcatcaaaaacactcctgttcctgcggatcctccaacagcgttcaaccaggccaagctgaattctttcatcacgcagtacagcaccggacaagtcagcgtggtgatcgagtgggagctgcagaaggagaacagcaagcgctggaacccagagattcagtatacttccaactactacaaatctacaaatgtggactttgctgttaatactgagggtgtttactctgagcttcgccccattggcactcgttacctcacccgtaatctgtaa

SEQ ID NO: 865 - protein, 738 aa, unidentified
  source 1..738: note = Adeno-associated virus
MAADGYLPDWLEDNLSEGIREWWDLKPGAPKPKANQQKQDDGRGLVLPGYKYLGPFNGLDKGEPVNAADAAALEHDKAYDQQLKAGDNPYLRYNHADAEFQERLQEDTSFGGNLGRAVFQAKKRVLEPLGLVEEGAKTAPGKKRPVEPSPQRSPDSSTGIGKKGQQPARKRLNFGQTGDSESVPDPQPIGEPPAAPSSVGSGTMAAGGGAPMADNNEGADGVGSSSGNWHCDSTWLGDRVITTSTRTWALPTYNNHLYKQISNGTSGGSTNDNTYFGYSTPWGYFDFNRFHCHFSPRDWQRLINNNWGFRPKRLSFKLFNIQVKEVTQNEGTKTIANNLTSTIQVFTDSEYQLPYVLGSAHQGCLPPFPADVFMIPQYGYLTLNNGSQAVGRSSFYCLEYFPSQMLRTGNNFSFSYTFEDVPFHSSYAHSQSLDRLMNPLIDQYLYYLSRTQSTGGTAGTQQLLFSQAGPSNMSAQARNWLPGPCYRQQRVSTTLSQNNNSNFAWTGATKYHLNGRDSLVNPGVAMATNKDDEDRFFPPSGILMFGKQGAGKDNVDYSNVMLTSEEEIKTTNPVATEQYGVVADNLQQQNTAPIVGAVNSQGALPGMVWQNRDVYLQGPIWAKIPHTDGNFHPSPLMGGFGLKHPPPQILIKNTPVPADPPTAFNQAKLNSFITQYSTGQVSVVIEWELQKENSKRWNPEIQYTSNYYKSTNVDFAVNTEGVYSELRPIGTRYLTRNL

SEQ ID NO: 866 - DNA, 2214 bp, unidentified
  source 1..2214: mol_type = unassigned DNA; note = Adeno-associated virus
atggctgctgacggttatcttccagattggctcgaggacaacctctctgagggcattcgcgagtggtgggacctgaaacctggagcccccaagcccaaggccaaccagcagaagcaggacgacggccggggtctggtgcttcctggctacaagtacctcggacccttcaacggactcgacaagggggagcccgtcaacgcggcggacgcagcggccctcgagcacgacaaggcctacgaccagcagctcaaagcgggtgacaatccgtacctgcggtataaccacgccgacgccgagtttcaggagcgtctgcaagaagatacgtcttttgggggcaacctcgggcgagcagtcttccaggccaagaagcgggttctcgaacctctcggtctggttgaggaagctgctaagacggctcctggaaagaagagaccggtagaaccgtcacctcagcgttcccccgactcctccacgggcatcggcaagaaaggccagcagcccgctagaaagagactgaactttgggcagactggcgactcagagtcagtccccgaccctcaaccaatcggagaaccaccagcaggcccctctggtctgggatctggtacaatggctgcaggcggtggcgccccaatggcagacaataacgaaggcgccgacggagtgggtaatgcctcaggaaattggcattgcgattccacatggctgggcgacagagtcatcaccaccagcacccgaacctgggctttgcccacctacaacaaccacctctacaagcaaatctccagtcagtcagcaggtagcaccaacgacaacgtctacttcggctacagcaccccctgggggtattttgacttcaacagattccactgtcacttctcaccacgtgactggcagcggctcatcaacaacaactggggattccggcccaagaagctcaacttcaagctgttcaacatccaggtcaaggaggtcacaacgaatgacggcgtcacgaccatcgccaataaccttaccagcacggttcaggtcttttcggactcggaataccagctgccctacgtcctcggctccgcacaccagggctgcctgcctccgttcccggcggacgtcttcatgattccccagtacggctacctgactctgaacaatggcagccaatcggtgggtcgttcctctttctactgcctggaatatttcccttctcaaatgctgagaacgggcaacaacttcaccatcagctacaccttcgaggacgttcccttccacagcagctacgcacacagccagagcctggaccggctgatgaatcctcttatcgaccagtacctgtattacctggccagaacacagagcaacgcaggaggcacagctggcaatcaggaactgcagttttatcagggcgggcctaccaccatggccgaacaagccaaaaactggctgcctggaccttgcttccggcaacaaagagtctccaagacgctggatcaaaacaacaacagcaactttgcttggactggtgccaccaaataccatctaaatggaagaaattcattggttaatcccggtgtcgccatggcaacccacaaggacgacgaggaacgcttcttcccttcgagcggagtcctgatttttggaaaaactggagcagctaataagactacactggaaaatgtgttaatgacaaatgaagaggaaattcgtcctaccaacccggtagccaccgaggaatacgggactgttagcagcaacctgcaggcggctaacactgcagcccagacacaagttgtcaacaaccagggagccttacctggtatggtctggcagaaccgggacgtgtacctgcagggtcccatctgggccaagattcctcacacagatggcaactttcacccgtctcctttaatgggcggctttggacttaaacatccgcctcctcagatcctcatcaaaaacactcctgttcctgcggatcctccaacagcgttcaaccaggccaagctgaattctttcatcacgcagtacagcaccggacaagtcagcgtggagatcgagtgggagctgcagaaggagaacagcaagcgctggaacccagagattcagtatacttccaactactacaaatctacaaatgtggactttgctgttaatactgagggtgtttactctgagcctcgccccattggcactcgttacctcacccgtaatctgtaa

SEQ ID NO: 867 - protein, 737 aa, unidentified
  source 1..737: note = Adeno-associated virus
MAADGYLPDWLEDNLSEGIREWWDLKPGAPKPKANQQKQDDGRGLVLPGYKYLGPFNGLDKGEPVNAADAAALEHDKAYDQQLKAGDNPYLRYNHADAEFQERLQEDTSFGGNLGRAVFQAKKRVLEPLGLVEEAAKTAPGKKRPVEPSPQRSPDSSTGIGKKGQQPARKRLNFGQTGDSESVPDPQPIGEPPAGPSGLGSGTMAAGGGAPMADNNEGADGVGNASGNWHCDSTWLGDRVITTSTRTWALPTYNNHLYKQISSQSAGSTNDNVYFGYSTPWGYFDFNRFHCHFSPRDWQRLINNNWGFRPKKLNFKLFNIQVKEVTTNDGVTTIANNLTSTVQVFSDSEYQLPYVLGSAHQGCLPPFPADVFMIPQYGYLTLNNGSQSVGRSSFYCLEYFPSQMLRTGNNFTISYTFEDVPFHSSYAHSQSLDRLMNPLIDQYLYYLARTQSNAGGTAGNQELQFYQGGPTTMAEQAKNWLPGPCFRQQRVSKTLDQNNNSNFAWTGATKYHLNGRNSLVNPGVAMATHKDDEERFFPSSGVLIFGKTGAANKTTLENVLMTNEEEIRPTNPVATEEYGTVSSNLQAANTAAQTQVVNNQGALPGMVWQNRDVYLQGPIWAKIPHTDGNFHPSPLMGGFGLKHPPPQILIKNTPVPADPPTAFNQAKLNSFITQYSTGQVSVEIEWELQKENSKRWNPEIQYTSNYYKSTNVDFAVNTEGVYSEPRPIGTRYLTRNL

SEQ ID NO: 868 - DNA, 2217 bp, unidentified
  source 1..2217: mol_type = unassigned DNA; note = Adeno-associated virus
atggctgccgatggttatcttccagattggctcgaggacaacctctctgagggcattcgcgagtggtgggacctgaaacctggagccccgaaacccaaagccaaccagcaaaagcaggacgacggccggggtctggtgcttcctggctacaagtacctcggacccttcaacggactcgacaagggggagcccgtcaacgcggcggacgcagcggccctcgagcacgacaaggcctacgaccagcagctcaaagcgggtgacaatccgtacctgcggtataatcacgccgacgccgagtttcaggagcgtctgcaagaagatacgtcttttgggggcaacctcgggcgagcagtcttccaggccaagaagcgggttctcgaacctctcggtctggttgaggaaggcgctaagacggctcctggaaagaagagaccggtagagccgtcaccacagcgttcccccgactcctccacgggcatcggcaagaaaggccagcagcccgccagaaagagactcaatttcggtcagactggcgactcagagtcagtccccgaccctcaacctatcggagaacctccagcagcgccctctagtgtgggatctggtacaatggctgcaggcggtggcgcaccaatggcagacaataacgaaggtgccgacggagtgggtagttcctcgggaaattggcattgcgattccacatggctgggcgacagagtcatcaccaccagcacccgaacctgggccctgcccgcctacaacaaccacctctacaagcaaatctccaacgggacctcgggaggcagcaccaacgacaacacctactttggctacagcaccccctgggggtattttgactttaacagattccactgccacttctcaccacgtgactggcagcgactcatcaacaacaactggggattccggcccaagagactcagcttcaagctcttcaacatccaggtcaaagaggtcacgcagaatgaaggcaccaagaccatcgccaataacctcaccagcaccatccaggtgtttacggactcggaataccagctgccgtacgtcctcggctctgcccaccagggctgcctgcctccgttcccggcggatgtcttcatgattcctcagtacggctacctgactctcaacaacggtagtcaggccgtgggacgttcctccttctactgcctggagtacttcccctctcagatgctgagaacgggcaacaacttttccttcagctacactttcgaggacgtgcctttccacagcagctacgcgcacagccagagtttggacaggctgatgaatcctctcatcgaccagtacctgtactacctgtcaagaacccagtctacgggaggcacagcgggaacccagcagttgctgttttctcaggccgggcctagcaacatgtcggctcaggccagaaactggctgcctggaccctgctacagacagcagcgcgtctccacgacactgtcgcaaaacaacaacagcaactttgcctggactggtgccaccaagtatcatctgagcggcagagactctctggtgaatccgggcgtcgccatggcaaccaacaaggacgacgaggaccgcttcttcccatccagcggcatcctcatgtttggcaagcagggagctggaaaagacaacgtggactatagcaacgtgatgctaaccagcgaggaagaaatcaagaccaccaaccccgtggccacagaacagtatggcgtggtggctgataacctacagcagcaaaacaccgctcctattgtgggggccgtcaacagccagggagccttacctggcatggtctggcagaaccgggacgtgtacctgcagggtcctatttgggccaagattcctcacacagatggcaactttcacccgtctcctttaatgggcggctttggacttaaacatccgcctcctcagatcctcatcaaaaacactcctgttcctgcggatcctccaacagcgttcaaccaggccaagctgaattcttccatcacgcagtacagcaccggacaagtcagcgtggagatcgagtgggagctgcagaaggagaacagcaagcgctggaacccagagattcagtatacttccaactactacaaatctacaaatgtggactttgctgttaatactgagggtgtttactctgagcctcgccccattggcactcgttacctcacccgtaatttgtaa

SEQ ID NO: 869 - protein, 738 aa, unidentified
  source 1..738: note = Adeno-associated virus
MAADGYLPDWLEDNLSEGIREWWDLKPGAPKPKANQQKQDDGRGLVLPGYKYLGPFNGLDKGEPVNAADAAALEHDKAYDQQLKAGDNPYLRYNHADAEFQERLQEDTSFGGNLGRAVFQAKKRVLEPLGLVEEGAKTAPGKKRPVEPSPQRSPDSSTGIGKKGQQPARKRLNFGQTGDSESVPDPQPIGEPPAAPSSVGSGTMAAGGGAPMADNNEGADGVGSSSGNWHCDSTWLGDRVITTSTRTWALPAYNNHLYKQISNGTSGGSTNDNTYFGYSTPWGYFDFNRFHCHFSPRDWQRLINNNWGFRPKRLSFKLFNIQVKEVTQNEGTKTIANNLTSTIQVFTDSEYQLPYVLGSAHQGCLPPFPADVFMIPQYGYLTLNNGSQAVGRSSFYCLEYFPSQMLRTGNNFSFSYTFEDVPFHSSYAHSQSLDRLMNPLIDQYLYYLSRTQSTGGTAGTQQLLFSQAGPSNMSAQARNWLPGPCYRQQRVSTTLSQNNNSNFAWTGATKYHLSGRDSLVNPGVAMATNKDDEDRFFPSSGILMFGKQGAGKDNVDYSNVMLTSEEEIKTTNPVATEQYGVVADNLQQQNTAPIVGAVNSQGALPGMVWQNRDVYLQGPIWAKIPHTDGNFHPSPLMGGFGLKHPPPQILIKNTPVPADPPTAFNQAKLNSSITQYSTGQVSVEIEWELQKENSKRWNPEIQYTSNYYKSTNVDFAVNTEGVYSEPRPIGTRYLTRNL

SEQ ID NO: 870 - protein, 736 aa, unidentified; identical to SEQ ID NO: 370
  source 1..736: note = Adeno-associated virus

SEQ ID NO: 871 - DNA, 2217 bp, unidentified
  source 1..2217: mol_type = unassigned DNA; note = Adeno-associated virus
atggctgctgacggttatcttccagattggctcgaggacaacctctctgagggcattcgcgagtggtgggacctgaaacctggagcccccaagcccaaggccaaccagcagaagcaggacgacggccggggtctggtgcttcctggctacaagtacctcggacccttcaacggactcgacaagggggagcccgtcaacgcggcggacgcagcggccctcgagcacgacaaggcctacgaccagcagctcaaagcgggtgacaatccgtacctgcggtataaccacgccgacgccgagtttcaggagcgtctgcaagaagatacgtcttttgggggcaacctcgggcgagcagtcttccaggccaagaagcgggttctcgaacctctcggtctggttgaggaagctgctaagacggctcctggaaagaagagaccggtagaaccgtcacctcagcgttcccccgactcctccacgggcatcggcaagaaaggccagcagcccgctaaaaagagactgaactttggtcagactggcgactcagagtcagtccccgaccctcaaccaatcggagaaccaccagcaggcccctctggtctgggatctggtacaatggctgcaggcggtggcgctccaatggcagacaataacgaaggcgccgacggagtgggtagttcctcaggaaattggcattgcgattccacatggctgggcgacagagtcatcaccaccagcacccgaacctgggccctgcccacctacaacaaccacctctacaagcaaatatccaatgggacatcgggaggaagcaccaacgacaacacctacttcggctacagcaccccctgggggtattttgacttcaacagattccactgccacttctcaccacgtgactggcagcgactcatcaacaacaactggggattccggccaaaaagactcagcttcaagctcttcaacatccaggtcaaggaggtcacgcagaatgaaggcaccaagaccatcgccaataaccttaccagcacgattcaggtatttacggactcggaataccagctgccgtacgtcctcggctccgcgcaccagggctgcctgcctccgttcccggcggacgtcttcatgattccccagtacggctaccttacactgaacaatggaagtcaagccgtaggccgttcctccttctactgcctggaatattttccatctcaaatgctgcgaactggaaacaattttgaattcagctacaccttcgaggacgtgcctttccacagcagctacgcacacagccagagcttggaccgactgatgaatcctctcatcgaccagtacctgtactacttatccagaactcagtccacaggaggaactcaaggtacccagcaattgttattttctcaagctgggcctgcaaacatgtcggctcaggctaagaactggctacctggaccttgctaccggcagcagcgagtctctacgacactgtcgcaaaacaacaacagcaactttgcttggactggtgccaccaaatatcacctgaacggaagagactctttggtaaatcccggtgtcgccatggcaacccacaaggacgacgaggaacgcttcttcccgtcgagtggagtcctgatgtttggaaaacagggtgctggaagagacaatgtggactacagcagcgttatgctaaccagcgaagaagaaattaaaaccactaaccctgtagccacagaacaatacggtgtggtggctgacaacttgcagcaaaccaatacagggcctattgtgggaaatgtcaacagccaaggagccttacctggcatggtctggcagaaccgagacgtgtacctgcagggtcccatctgggccaagattcctcacacggacggcaacttccacccttcaccgctaatgggaggatttggactgaagcacccacctcctcagatcctgatcaagaacacgccggtacctgcggatcctccaacaacgttcagccaggcgaaattggcttccttcattacgcagtacagcaccggacaggtcagcgtggaaatcgagtgggagctgcagaaggagaacagcaaacgctggaacccagagattcagtacacttcaaactactacaaatctacaaatgtggactttgctgtcaatacagagggaacttattctgagcctcgccccattggtactcgttacctcacccgtaatctgtaa

SEQ ID NO: 872 - protein, 738 aa, unidentified
  source 1..738: note = Adeno-associated virus
MAADGYLPDWLEDNLSEGIREWWDLKPGAPKPKANQQKQDDGRGLVLPGYKYLGPFNGLDKGEPVNAADAAALEHDKAYDQQLKAGDNPYLRYNHADAEFQERLQEDTSFGGNLGRAVFQAKKRVLEPLGLVEEGAKTAPGKKRPVEPSPQRSPDSSTGIGKKGQQPARKRLNFGQTGDSESVPDPQPLGEPPAAPSSVGSGTMAAGGGAPMADNNEGADGVGSSSGNWHCDSTWLGDRVITTSTRTWALPTYNNHLYKQISNGTSGGSTNDNTYFGYSTPWGYFDFNRFHCHFSPRDWQRLINNNWGFRPKRLSFKLFNIQVKEVTQNEGTKTIANNLTSTIQVFTDSEYQLPYVLGSAHQGCLPPFPADVFMIPQYGYLTLNNGSQAVGRSSFYCLEYFPSQMLRTGNNFSFSYTFEDVPFHSSYAHSQSLDRLMNPLIDQYLYYLSRTQSTGGTAGTQQLLFSQAGPSNMSAQARNWLPGPCYRQQRVSTTLSQNNNSNFAWTGATKYHLNGRDSLVNPGVAMATNKDDEDRFFPSSGILMFGKQGAGKDNVDYSNVMLTSEEEIKTTNPVATEQYGVVADNLQRQNTAPIVGAVNSQGALPGMVWQNRDVYLQGPIWAKIPHTDGNFHPSPLMGGFGLKHPPPQILIKNTPVPADPPTAFNQAKLNSFITQYSTGQVSVEIEWELQKENSKRWNPEIQYTSNYYKSTNVDFAVNTEGVYSEPRPIGTRYLTRNL

SEQ ID NO: 873 - protein, 736 aa, unidentified
  source 1..736: note = Adeno-associated virus
MAADGYLPDWLEDNLSEGIREWLNLKPGAPQPKANQQKQDNARGLVLPGYKYLGPFNGLDKGDPVNEADAAALEHDKAYGQQLKAGDNPYLKYNHADAEFQERLQKDTSFGGNLGKAVFQAKKRILEPLGLVETPAKTAPGKKRPVDPSPQRSPDSSSGIGKKSPHPARKRLNFGQTGEAESVPDPQPIGEPPSDPSSVGSGTMAAGGGAPMADNNEGADGVGNSSGNWHCDSTWLGDRVITTSTRTWALPTYNNHLYKQISSQSGATNDNHYFGYSTPWGYFDFNRFHCHFSPRDWQRLINNNWGFRPKRLSFKLFNIQVKEVTQNDGTTTIANNLTSTVQVFTDSEYQLPYVLGSAHQGCLPPFPADVFMIPQYGYLTLNNGSQAVGRSSFYCLEYFPSQMLRTGNNFQFSYTFEDVPFHSSYAHSQSLDRLMNPLIDQYLYYLSKTQGTNATVQGAKLQFSQAGPSNMRDQARNWLPGPCYRQQRVSKTANDNNNSEYAWTGATKYHLNGRDSLVNPGPAMASHKDDEEKFFPMNGTLVFGKNGAGNSNVDIENVMITDEEEIRTTNPVATEQYGVVSDNLQSSNTRPITGDVDSQGVLPGMVWQDRDVYLQGPIWAKIPHTDGHFHPSPLMGGFGLKHPPPQILIKNTPVPANPATTFTPGKFASFITQYSTGQVSVQIEWELQKENSKRWNPEIQYTSNYNKSVNVDFTVDTNGVYSEPRPIGTRYLTRNL

SEQ ID NO: 874 - protein, 736 aa, unidentified; identical to SEQ ID NO: 449
  source 1..736: note = Adeno-associated virus

SEQ ID NO: 875 - protein, 736 aa, unidentified
  source 1..736: note = Adeno-associated virus
MAADGYLPDWLEDNLSEGIREWWDLKPGAPKPKANQQKQDDGRGLVLPGYKYLGPFNGLDKGEPVNAADAAALEHDKAYDQQLKAGDNPYLRYNHADAEFQERLQEDTSFGGNLGRAVFQAKKRVLEPLGLVEEGAKTAPGKKRPVEQSPQEPDSSSGIGKTGQQPAKKRLNFGQTGDSESVPDPQPLGEPPAAPSGLGPNTMASGGGAPMADNNEGADGVGNSSGNWHCDSTWLGDRVITTSTRTWALPTYNNHLYKQISNGTSGGSTNDNTYFGYSTPWGYFDFNRFHCHFSPRDWQRLINNNWGFRPKRLNFKLFNIQVKEVTTNEGTKTIANNLTSTVQVFTDSEYQLPYVLGSAHQGCLPPFPADVFMVPQYGYLTLNNGSQALGRSSFYCLEYFPSQMLRTGNNFQFSYTFEDVPFHSSYAHSQSLDRLMNPLIDQYLYYLVRTQTTGTGGTQTLAFSQAGPSSMANQARNWVPGPCYRQQRVSTTTNQNNNSNFAWTGAAKFKLNGRDSLMNPGVAMASHKDDEDRFFPSSGVLIFGKQGAGNDGVDYSQVLITDEEEIKATNPVATEEYGAVAINNQAANTQAQTGLVHNQGVIPGMVWQNRDVYLQGPIWAKIPHTDGNFHPSPLMGGFGLKHPPPQILIKNTPVPADPPLTFNQAKLNSFITQYSTGQVSVEIEWELQKENSKRWNPEIQYTSNYYKSTNVDFAVNTEGVYSEPRPIGTRYLTRNL

SEQ ID NO: 876 - protein, 736 aa, synthetic construct; identical to SEQ ID NO: 875
  source 1..736: note = Description of Artificial Sequence: Synthetic polypeptide

SEQ ID NO: 877 - protein, 736 aa, synthetic construct
  source 1..736: note = Description of Artificial Sequence: Synthetic polypeptide
MAADGYLPDWLEDNLSEGIREWWDLKPGAPKPKANQQKQDDGRGLVLPGYKYLGPFNGLDKGEPVNAADAAALEHDKAYDQQLKAGDNPYLRYNHADAEFQERLQEDTSFGGNLGRAVFQAKKRVLEPLGLVEEGAKTAPGKKRPVEQSPQEPDSSSGIGKTGQQPAKKRLNFGQTGDSESVPDPQPLGEPPAAPSGLGPNTMASGGGAPMADNNEGADGVGNSSGNWHCDSTWLGDRVITTSTRTWALPTYNNHLYKQISNGTSGGSTNDNTYFGYSTPWGYFDFNRFHCHFSPRDWQRLINNNWGFRPKRLNFKLFNIQVKEVTTNEGTKTIANNLTSTVQVFTDSEYQLPYVLGSAHQGCLPPFPADVFMVPQYGYLTLNNGSQALGRSSFYCLEYFPSQMLRTGNNFQFSYTFEDVPFHSSYAHSQSLDRLMNPLIDQYLYYLVRTQTTGTGGTQTLAFSQAGPSSMANQARNWVPGPCYRQQRVSTTTNQNNNSNFAWTGAAKFKLNGRDSLMNPGVAMASHKDDEDRFFPSSGVLIFGKQGAGNDGVDYSQVLITDEEEIKATNPVATEEYGAVAINNQRANTQAQTGLVHNQGVIPGMVWQNRDVYLQGPIWAKIPHTDGNFHPSPLMGGFGLKHPPPQILIKNTPVPADPPLTFNQAKLNSFITQYSTGQVSVEIEWELQKENSKRWNPEIQYTSNYYKSTNVDFAVNTEGVYSEPRPIGTRYLTRNL

SEQ ID NO: 878 - protein, 736 aa, synthetic construct
  source 1..736: note = Description of Artificial Sequence: Synthetic polypeptide
MAADGYLPDWLEDNLSEGIREWWDLKPGAPKPKANQQKQDDGRGLVLPGYKYLGPFNGLDKGEPVNAADAAALEHDKAYDQQLKAGDNPYLRYNHADAEFQERLQEDTSFGGNLGRAVFQAKKRVLEPLGLVEEGAKTAPGKKRPVEQSPQEPDSSSGIGKTGQQPAKKRLNFGQTGDSESVPDPQPLGEPPAAPSGLGPNTMASGGGAPMADNNEGADGVGNSSGNWHCDSTWLGDRVITTSTRTWALPTYNNHLYKQISNGTSGGSTNDNTYFGYSTPWGYFDFNRFHCHFSPRDWQRLINNNWGFRPKRLNFKLFNIQVKEVTTNEGTKTIANNLTSTVQVFTDSEYQLPYVLGSAHQGCLPPFPADVFMVPQYGYLTLNNGSQALGRSSFYCLEYFPSQMLRTGNNFQFSYTFEDVPFHSSYAHSQSLDRLMNPLIDQYLYYLVRTQTTGTGGTQTLAFSQAGPSSMANQARNWVPGPCYRQQRVSTTTNQNNNSNFAWTGAAKFKLNGRDSLMNPGVAMASHKDDEDAFFPSSGVLIFGKQGAGNDGVDYSQVLITDEEEIKATNPVATEEYGAVAINNQAANTQAQTGLVHNQGVIPGMVWQNRDVYLQGPIWAKIPHTDGNFHPSPLMGGFGLKHPPPQILIKNTPVPADPPLTFNQAKLNSFITQYSTGQVSVEIEWELQKENSKRWNPEIQYTSNYYKSTNVDFAVNTEGVYSEPRPIGTRYLTRNL

SEQ ID NO: 879 - DNA, 1803 bp, unidentified
  source 1..1803: mol_type = unassigned DNA; note = Bovine adeno-associated virus
acggcgcctgcggcaaaaaagaggcctctagagcagagtcctcaagagccagactcctcgagcggagttggcaagaaaggcaaacagcctgccagaaagagactcaactttgacgacgaacctggagccggagacgggcctcccccagaaggaccatcttccggagctatgtctactgagactgaaatgcgtgcagcagctggcggaaatggtggcgatgcgggacaaggtgccgagggagtgggtaatgcctccggtgattggcattgcgattccacttggtcagagagccacgtcaccaccacctcaacccgcacctgggtcctgccgacctacaacaaccacctgtacctgcggctcggctcgagcaacgccagcgacaccttcaacggattctccaccccctggggatactttgactttaaccgcttccactgccacttctcgccaagagactggcaaaggctcatcaacaaccactggggactgcgccccaaaagcatgcaagtccgcatcttcaacatccaagttaaggaggtcacgacgtctaacggggagacgaccgtatccaacaacctcaccagcacggtccagatctttgcggacagcacgtacgagctcccgtacgtgatggatgcaggtcaggagggcagcttgcctcctttccccaacgacgtgttcatggtgcctcagtacgggtactgcggactggtaaccggaggcagctctcaaaaccagacagacagaaatgccttctactgtctggagtactttcccagccagatgctgagaaccggaaacaactttgagatggtgtacaagtttgaaaacgtgcccttccactccatgtacgctcacagccagagcctggataggctgatgaacccgctgctggaccagtacctgtgggagctccagtctaccacctctggaggaactctcaaccagggcaattcagccaccaactttgccaagctgaccaaaacaaacttttctggctaccgcaaaaactggctcccggggcccatgatgaagcagcagagattctccaagactgccagtcaaaactacaagattccccagggaagaaacaacagtctgctccattatgagaccagaactaccctcgacggaagatggagcaattttgccccgggaacggccatggcaaccgcagccaacgacgccaccgacttctctcaggcccagctcatctttgcggggcccaacatcaccggcaacaccaccacagatgccaataacctgatgttcacttcagaagatgaacttagggccaccaacccccgggacactgacctgtttggccacctggcaaccaaccagcaaaacgccaccaccgttcctaccgtagacgacgtggacggagtcggcgtgtacccgggaatggtgtggcaggacagagacatttactaccaagggcccatttgggccaaaattccacacacggatggacactttcacccgtctcctctcattggcggatttggactgaaaagcccgcctccacaaatattcatcaaaaacactcctgtacccgccaatcccgcaacgaccttctctccggccagaatcaacagcttcatcacccagtacagcaccggacaggtggctgtcaaaatagaatgggaaatccagaaggagcggtccaagagatggaacccagaggtccagttcacgtccaactacggagcacaggactcgcttctctgggctcccgacaacgccggagcctacaaagagcccagggccattggatcccgatacctcaccaaccacctctag

SEQ ID NO: 880 - DNA, 1617 bp, unidentified
  source 1..1617: mol_type = unassigned DNA; note = Bovine adeno-associated virus
atgcgtgcagcagctggcggaaatggtggcgatgcgggacaaggtgccgagggagtgggtaatgcctccggtgattggcattgcgattccacttggtcagagagccacgtcaccaccacctcaacccgcacctgggtcctgccgacctacaacaaccacctgtacctgcggctcggctcgagcaacgccagcgacaccttcaacggattctccaccccctggggatactttgactttaaccgcttccactgccacttctcgccaagagactggcaaaggctcatcaacaaccactggggactgcgccccaaaagcatgcaagtccgcatcttcaacatccaagttaaggaggtcacgacgtctaacggggagacgaccgtatccaacaacctcaccagcacggtccagatctttgcggacagcacgtacgagctcccgtacgtgatggatgcaggtcaggagggcagcttgcctcctttccccaacgacgtgttcatggtgcctcagtacgggtactgcggactggtaaccggaggcagctctcaaaaccagacagacagaaatgccttctactgtctggagtactttcccagccagatgctgagaaccggaaacaactttgagatggtgtacaagtttgaaaacgtgcccttccactccatgtacgctcacagccagagcctggataggctgatgaacccgctgctggaccagtacctgtgggagctccagtctaccacctctggaggaactctcaaccagggcaattcagccaccaactttgccaagctgaccaaaacaaacttttctggctaccgcaaaaactggctcccggggcccatgatgaagcagcagagattctccaagactgccagtcaaaactacaagattccccagggaagaaacaacagtctgctccattatgagaccagaactaccctcgacggaagatggagcaattttgccccgggaacggccatggcaaccgcagccaacgacgccaccgacttctctcaggcccagctcatctttgcggggcccaacatcaccggcaacaccaccacagatgccaataacctgatgttcacttcagaagatgaacttagggccaccaacccccgggacactgacctgtttggccacctggcaaccaaccagcaaaacgccaccaccgttcctaccgtagacgacgtggacggagtcggcgtgtacccgggaatggtgtggcaggacagagacatttactaccaagggcccatttgggccaaaattccacacacggatggacactttcacccgtctcctctcattggcggatttggactgaaaagcccgcctccacaaatattcatcaaaaacactcctgtacccgccaatcccgcaacgaccttctctccggccagaatcaacagcttcatcacccagtacagcaccggacaggtggctgtcaaaatagaatgggaaatccagaaggagcggtccaagagatggaacccagaggtccagttcacgtccaactacggagcacaggactcgcttctctgggctcccgacaacgccggagcctacaaagagcccagggccattggatcccgatacctcaccaaccacctctag

SEQ ID NO: 881 - DNA, 1173 bp, unidentified
  source 1..1173: mol_type = unassigned DNA; note = Bovine adeno-associated virus
atggcgctggtaagctggctggtggaacatggcatcacttccgagaagcagtggattcaggagaatcaggagagctacctgtccttcaactccacgggaaactctcggagccagattaaagccgcgcttgacaacgcgtcaaaaattatgagtctgaccaaatctgcctcagactatctcgtgggacagactgttccagaggacatttctgaaaacagaatctggcagatttttgatctcaacggctacgacccggcatacgcgggctctgttctctacggctggtgcactcgcgcctttggaaagaggaacaccgtctggctgtatggacccgcgaccaccggaaagaccaacatcgcggaagccatctctcacaccgtgcccttttatggctgtgtgaactggactaatgagaactttccctttaatgactgtgtggaaaaaatgttgatctggtgggaggagggaaagatgaccagcaaggtggtggaacccgccaaggccatcttgggggggtctagagtacgagtggatcaaaaatgtaaatcctctgtacaagtagactctaccccggtgattatcacctccaatactaacatgtgtgtggtggtggatgggaactccacgacctttgaacaccagcagccgctggaagaccgcatgttcagatttgaactcatgcggcggctcccgccagattttggcaagattaccaagcaggaagtcaaagacttttttgcttgggcaaaggtcaaccaggtgccggtgactcacgagtttatggttcccaagaaagtggcgggaactgagagggcggagacttctagaaaacgcccactggatgacgtcaccaataccaactataaaagtccggagaagcgggcccggctctcagttgttcctgagacgcctcgcagttcagacgtgcctgtagagcccgctcctctgcgacctctcaactggtcttccaggtatgaatgcagatgtgactatcatgctaaatttgactctgtaacgggggaatgtgacgagtgtgaatatttgaatcggggcaaaaatggctgtatctttcataatgctacacattgtcaaatttgtcacgctgttcctccatgggaaaaggaaaatgtgtcagattttaatgattttgatgactgtaataaagagcagtaa

SEQ ID NO: 882 - DNA, 1833 bp, unidentified
  source 1..1833: mol_type = unassigned DNA; note = Bovine adeno-associated virus
atggctaccttctatgaagtcattgttcgcgttccatttgatgtggaagagcacctgcctggaatttctgacaactttgtagactgggtaactggtcaaatttgggagctgcctcccgagtcagatttgaatttgactctgattgagcagcctcagctgacggtggctgacagaattcgccgcgtgttcctgtacgagtggaacaaattttccaagcaggagagcaaattctttgtgcagtttgaaaagggatctgaatattttcatctgcacacgctcgtggagacctccggcatctcttctatggtccttggccgctacgtgagtcagattcgcgcccagctggtgaaggtggtgttccagaacattgagccgcggattaacgactgggtcgccatcaccaaggtaaagaagggcggagccaataaggtggtggattctgggtatattcccgcctacctgctgccgaaggtccaaccagagcttcagtgggcgtggactaacctcgaagagtataaattggccgccctcaatctggaggagcgcaaacggctcgtcgctcagtttcagcttgagtcctcgcagcgctcgcaagaggcatcttcccagagggacgtttcggctgacccggtcatcaagagcaagacttcccagaaatacatggcgctggtaagctggctggtggaacatggcatcacttccgagaagcagtggattcaggagaatcaggagagctacctgtccttcaactccacgggaaactctcggagccagattaaagccgcgcttgacaacgcgtcaaaaattatgagtctgaccaaatctgcctcagactatctcgtgggacagactgttccagaggacatttctgaaaacagaatctggcagatttttgatctcaacggctacgacccggcatacgcgggctctgttctctacggctggtgcactcgcgcctttggaaagaggaacaccgtctggctgtatggacccgcgaccaccggaaagaccaacatcgcggaagccatctctcacaccgtgcccttttatggctgtgtgaactggactaatgagaactttccctttaatgactgtgtggaaaaaatgttgatctggtgggaggagggaaagatgaccagcaaggtggtggaacccgccaaggccatcttgggggggtctagagtacgagtggatcaaaaatgtaaatcctctgtacaagtagactctaccccggtgattatcacctccaatactaacatgtgtgtggtggtggatgggaactccacgacctttgaacaccagcagccgctggaagaccgcatgttcagatttgaactcatgcggcggctcccgccagattttggcaagattaccaagcaggaagtcaaagacttttttgcttgggcaaaggtcaaccaggtgccggtgactcacgagtttatggttcccaagaaagtggcgggaactgagagggcggagacttctagaaaacgcccactggatgacgtcaccaataccaactataaaagtccggagaagcgggcccggctctcagttgttcctgagacgcctcgcagttcagacgtgcctgtagagcccgctcctctgcgacctctcaactggtcttccaggtatgaatgcagatgtgactatcatgctaaatttgactctgtaacgggggaatgtgacgagtgtgaatatttgaatcggggcaaaaatggctgtatctttcataatgctacacattgtcaaatttgtcacgctgttcctccatgggaaaaggaaaatgtgtcagattttaatgattttgatgactgtaataaagagcagtaa

SEQ ID NO: 883 - DNA, 2211 bp, unidentified
  source 1..2211: mol_type = unassigned DNA; note = Bovine adeno-associated virus
atgtcttttgttgaccaccctccagattggttggaatcgatcggcgacggctttcgtgaatttctcggccttgaggcgggtcccccgaaacccaaggccaatcaacagaagcaagataacgctcgaggtcttgtgcttcctgggtacaagtatcttggtcctgggaacggccttgataagggcgatcctgtcaattttgctgacgaggttgcccgagagcacgacctctcctaccagaaacagcttgaggcgggcgataacccttacctcaagtacaaccacgcggacgcagagtttcaggagaaactcgcttctgacacttcttttgggggaaaccttgggaaggctgttttccaggctaaaaagaggattctcgaacctcttggcctggttgagacgccggataaaacggcgcctgcggcaaaaaagaggcctctagagcagagtcctcaagagccagactcctcgagcggagttggcaagaaaggcaaacagcctgccagaaagagactcaactttgacgacgaacctggagccggagacgggcctcccccagaaggaccatcttccggagctatgtctactgagactgaaatgcgtgcagcagctggcggaaatggtggcgatgcgggacaaggtgccgagggagtgggtaatgcctccggtgattggcattgcgattccacttggtcagagagccacgtcaccaccacctcaacccgcacctgggtcctgccgacctacaacaaccacctgtacctgcggctcggctcgagcaacgccagcgacaccttcaacggattctccaccccctggggatactttgactttaaccgcttccactgccacttctcgccaagagactggcaaaggctcatcaacaaccactggggactgcgccccaaaagcatgcaagtccgcatcttcaacatccaagttaaggaggtcacgacgtctaacggggagacgaccgtatccaacaacctcaccagcacggtccagatctttgcggacagcacgtacgagctcccgtacgtgatggatgcaggtcaggagggcagcttgcctcctttccccaacgacgtgttcatggtgcctcagtacgggtactgcggactggtaaccggaggcagctctcaaaaccagacagacagaaatgccttctactgtctggagtactttcccagccagatgctgagaaccggaaacaactttgagatggtgtacaagtttgaaaacgtgcccttccactccatgtacgctcacagccagagcctggataggctgatgaacccgctgctggaccagtacctgtgggagctccagtctaccacctctggaggaactctcaaccagggcaattcagccaccaactttgccaagctgaccaaaacaaacttttctggctaccgcaaaaactggctcccggggcccatgatgaagcagcagagattctccaagactgccagtcaaaactacaagattccccagggaagaaacaacagtctgctccattatgagaccagaactaccctcgacggaagatggagcaattttgccccgggaacggccatggcaaccgcagccaacgacgccaccgacttctctcaggcccagctcatctttgcggggcccaacatcaccggcaacaccaccacagatgccaataacctgatgttcacttcagaagatgaacttagggccaccaacccccgggacactgacctgtttggccacctggcaaccaaccagcaaaacgccaccaccgttcctaccgtagacgacgtggacggagtcggcgtgtacccgggaatggtgtggcaggacagagacatttactaccaagggcccatttgggccaaaattccacacacggatggacactttcacccgtctcctctcattggcggatttggactgaaaagcccgcctccacaaatattcatcaaaaacactcctgtacccgccaatcccgcaacgaccttctctccggccagaatcaacagcttcatcacccagtacagcaccggacaggtggctgtcaaaatagaatgggaaatccagaaggagcggtccaagagatggaacccagaggtccagttcacgtccaactacggagcacaggactcgcttctctgggctcccgacaacgccggagcctacaaagagcccagggccattggatcccgatacctcaccaaccacctctag

SEQ ID NO: 884 - DNA, 4694 bp, unidentified
  source 1..4694: mol_type = unassigned DNA; note = Bovine adeno-associated virus
gtggcactcccccccctgtcgcgttcgctcgttcgctggctcgattgggggggtggcagctcaaagagctgccagacgacggccctctgggccgtcgcccccccaatcgagccagcgaacgagcgaacgcgacaggggggggagtgccacactctctagcaagggggttttgtaggtggtgatgtcattgttgatgtcattatagttgtcacgcgatagttaatgattaacagtcatgtgatgtgtgttatccaataggatgaaagcgcgcgaatgagatctcgcgagacttccggggtataaaaggggtgagtgaacgagcccgccgccattctctgctctggactgctagaggaccctcgctgccatggctaccttctatgaagtcattgttcgcgttccatttgatgtggaagagcacctgcctggaatttctgacaactttgtagactgggtaactggtcaaatttgggagctgcctcccgagtcagatttgaatttgactctgattgagcagcctcagctgacggtggctgacagaattcgccgcgtgttcctgtacgagtggaacaaattttccaagcaggagagcaaattctttgtgcagtttgaaaagggatctgaatattttcatctgcacacgctcgtggagacctccggcatctcttctatggtccttggccgctacgtgagtcagattcgcgcccagctggtgaaggtggtgttccagaacattgagccgcggattaacgactgggtcgccatcaccaaggtaaagaagggcggagccaataaggtggtggattctgggtatattcccgcctacctgctgccgaaggtccaaccagagcttcagtgggcgtggactaacctcgaagagtataaattggccgccctcaatctggaggagcgcaaacggctcgtcgctcagtttcagcttgagtcctcgcagcgctcgcaagaggcatcttcccagagggacgtttcggctgacccggtcatcaagagcaagacttcccagaaatacatggcgctggtaagctggctggtggaacatggcatcacttccgagaagcagtggattcaggagaatcaggagagctacctgtccttcaactccacgggaaactctcggagccagattaaagccgcgcttgacaacgcgtcaaaaattatgagtctgaccaaatctgcctcagactatctcgtgggacagactgttccagaggacatttctgaaaacagaatctggcagatttttgatctcaacggctacgacccggcatacgcgggctctgttctctacggctggtgcactcgcgcctttggaaagaggaacaccgtctggctgtatggacccgcgaccaccggaaagaccaacatcgcggaagccatctctcacaccgtgcccttttatggctgtgtgaactggactaatgagaactttccctttaatgactgtgtggaaaaaatgttgatctggtgggaggagggaaagatgaccagcaaggtggtggaacccgccaaggccatcttgggggggtctagagtacgagtggatcaaaaatgtaaatcctctgtacaagtagactctaccccggtgattatcacctccaatactaacatgtgtgtggtggtggatgggaactccacgacctttgaacaccagcagccgctggaagaccgcatgttcagatttgaactcatgcggcggctcccgccagattttggcaagattaccaagcaggaagtcaaagacttttttgcttgggcaaaggtcaaccaggtgccggtgactcacgagtttatggttcccaagaaagtggcgggaactgagagggcggagacttctagaaaacgcccactggatgacgtcaccaataccaactataaaagtccggagaagcgggcccggctctcagttgttcctgagacgcctcgcagttcagacgtgcctgtagagcccgctcctctgcgacctctcaactggtcttccaggtatgaatgcagatgtgactatcatgctaaatttgactctgtaacgggggaatgtgacgagtgtgaatatttgaatcggggcaaaaatggctgtatctttcataatgctacacattgtcaaatttgtcacgctgttcctccatgggaaaaggaaaatgtgtcagattttaatgattttgatgactgtaataaagagcagtaaataaagtgagtagtcatgtcttttgttgaccaccctccagattggttggaatcgatcggcgacggctttcgtgaatttctcggccttgaggcgggtcccccgaaacccaaggccaatcaacagaagcaagataacgctcgaggtcttgtgcttcctgggtacaagtatcttggtcctgggaacggccttgataagggcgatcctgtcaattttgctgacgaggttgcccgagagcacgacctctcctaccagaaacagcttgaggcgggcgataacccttacctcaagtacaaccacgcggacgcagagtttcaggagaaactcgcttctgacacttcttttgggggaaaccttgggaaggctgttttccaggctaaaaagaggattctcgaacctcttggcctggttgagacgccggataaaacggcgcctgcggcaaaaaagaggcctctagagcagagtcctcaagagccagactcctcgagcggagttggcaagaaaggcaaacagcctgccagaaagagactcaactttgacgacgaacctggagccggagacgggcctcccccagaaggaccatcttccggagctatgtctactgagactgaaatgcgtgcagcagctggcggaaatggtggcgatgcgggacaaggtgccgagggagtgggtaatgcctccggtgattggcattgcgattccacttggtcagagagccacgtcaccaccacctcaacccgcacctgggtcctgccgacctacaacaaccacctgtacctgcggctcggctcgagcaacgccagcgacaccttcaacggattctccaccccctggggatactttgactttaaccgcttccactgccacttctcgccaagagactggcaaaggctcatcaacaaccactggggactgcgccccaaaagcatgcaagtccgcatcttcaacatccaagttaaggaggtcacgacgtctaacggggagacgaccgtatccaacaacctcaccagcacggtccagatctttgcggacagcacgtacgagctcccgtacgtgatggatgcaggtcaggagggcagcttgcctcctttccccaacgacgtgttcatggtgcctcagtacgggtactgcggactggtaaccggaggcagctctcaaaaccagacagacagaaatgccttctactgtctggagtactttcccagccagatgctgagaaccggaaacaactttgagatggtgtacaagtttgaaaacgtgcccttccactccatgtacgctcacagccagagcctggataggctgatgaacccgctgctggaccagtacctgtgggagctccagtctaccacctctggaggaactctcaaccagggcaattcagccaccaactttgccaagctgaccaaaacaaacttttctggctaccgcaaaaactggctcccggggcccatgatgaagcagcagagattctccaagactgccagtcaaaactacaagattccccagggaagaaacaacagtctgctccattatgagaccagaactaccctcgacggaagatggagcaattttgccccgggaacggccatggcaaccgcagccaacgacgccaccgacttctctcaggcccagctcatctttgcggggcccaacatcaccggcaacaccaccacagatgccaataacctgatgttcacttcagaagatgaacttagggccaccaacccccgggacactgacctgtttggccacctggcaaccaaccagcaaaacgccaccaccgttcctaccgtagacgacgtggacggagtcggcgtgtacccgggaatggtgtggcaggacagagacatttactaccaagggcccatttgggccaaaattccacacacggatggacactttcacccgtctcctctcattggcggatttggactgaaaagcccgcctccacaaatattcatcaaaaacactcctgtacccgccaatcccgcaacgaccttctctccggccagaatcaacagcttcatcacccagtacagcaccggacaggtggctgtcaaaatagaatgggaaatccagaaggagcggtccaagagatggaacccagaggtccagttcacgtccaactacggagcacaggactcgcttctctgggctcccgacaacgccggagcctacaaagagcccagggccattggatcccgatacctcaccaaccacctctagcccaattctgttgcataccctcaataaaccgtgtattcgtttcagtaaaatactgcctcttgtggtcattcggcgtacaacagcttacaacaacaacaaaacccccttgctagagagtgtggcactcccccccctgtcgcgttcgctcgttcgctggctcgattgggggggtggcagctcaaagagctgccagacgacggccctctgggccgtcgcccccccaatcgagccagcgaacgagcgaacgcgacaggggggggagtgccac

SEQ ID NO: 885 - protein, 390 aa, unidentified
  source 1..390: note = Bovine adeno-associated virus
MALVSWLVEHGITSEKQWIQENQESYLSFNSTGNSRSQIKAALDNASKIMSLTKSASDYLVGQTVPEDISENRIWQIFDLNGYDPAYAGSVLYGWCTRAFGKRNTVWLYGPATTGKTNIAEAISHTVPFYGCVNWTNENFPFNDCVEKMLIWWEEGKMTSKVVEPAKAILGGSRVRVDQKCKSSVQVDSTPVIITSNTNMCVVVDGNSTTFEHQQPLEDRMFRFELMRRLPPDFGKITKQEVKDFFAWAKVNQVPVTHEFMVPKKVAGTERAETSRKRPLDDVTNTNYKSPEKRARLSVVPETPRSSDVPVEPAPLRPLNWSSRYECRCDYHAKFDSVTGECDECEYLNRGKNGCIFHNATHCQICHAVPPWEKENVSDFNDFDDCNKEQ

SEQ ID NO: 886 - protein, 610 aa, unidentified
  source 1..610: note = Bovine adeno-associated virus
MATFYEVIVRVPFDVEEHLPGISDNFVDWVTGQIWELPPESDLNLTLIEQPQLTVADRIRRVFLYEWNKFSKQESKFFVQFEKGSEYFHLHTLVETSGISSMVLGRYVSQIRAQLVKVVFQNIEPRINDWVAITKVKKGGANKVVDSGYIPAYLLPKVQPELQWAWTNLEEYKLAALNLEERKRLVAQFQLESSQRSQEASSQRDVSADPVIKSKTSQKYMALVSWLVEHGITSEKQWIQENQESYLSFNSTGNSRSQIKAALDNASKIMSLTKSASDYLVGQTVPEDISENRIWQIFDLNGYDPAYAGSVLYGWCTRAFGKRNTVWLYGPATTGKTNIAEAISHTVPFYGCVNWTNENFPFNDCVEKMLIWWEEGKMTSKVVEPAKAILGGSRVRVDQKCKSSVQVDSTPVIITSNTNMCVVVDGNSTTFEHQQPLEDRMFRFELMRRLPPDFGKITKQEVKDFFAWAKVNQVPVTHEFMVPKKVAGTERAETSRKRPLDDVTNTNYKSPEKRARLSVVPETPRSSDVPVEPAPLRPLNWSSRYECRCDYHAKFDSVTGECDECEYLNRGKNGCIFHNATHCQICHAVPPWEKENVSDFNDFDDCNKEQ

SEQ ID NO: 887 - protein, 538 aa, synthetic construct
  source 1..538: note = Description of Artificial Sequence: Synthetic polypeptide
MRAAAGGNGGDAGQGAEGVGNASGDWHCDSTWSESHVTTTSTRTWVLPTYNNHLYLRLGSSNASDTFNGFSTPWGYFDFNRFHCHFSPRDWQRLINNHWGLRPKSMQVRIFNIQVKEVTTSNGETTVSNNLTSTVQIFADSTYELPYVMDAGQEGSLPPFPNDVFMVPQYGYCGLVTGGSSQNQTDRNAFYCLEYFPSQMLRTGNNFEMVYKFENVPFHSMYAHSQSLDRLMNPLLDQYLWELQSTTSGGTLNQGNSATNFAKLTKTNFSGYRKNWLPGPMMKQQRFSKTASQNYKIPQGRNNSLLHYETRTTLDGRWSNFAPGTAMATAANDATDFSQAQLIFAGPNITGNTTTDANNLMFTSEDELRATNPRDTDLFGHLATNQQNATTVPTVDDVDGVGVYPGMVWQDRDIYYQGPIWAKIPHTDGHFHPSPLIGGFGLKSPPPQIFIKNTPVPANPATTFSPARINSFITQYSTGQVAVKIEWEIQKERSKRWNPEVQFTSNYGAQDSLLWAPDNAGAYKEPRAIGSRYLTNHL

SEQ ID NO: 888 - protein, 736 aa, synthetic construct
  source 1..736: note = Description of Artificial Sequence: Synthetic polypeptide
MSFVDHPPDWLESIGDGFREFLGLEAGPPKPKANQQKQDNARGLVLPGYKYLGPGNGLDKGDPVNFADEVAREHDLSYQKQLEAGDNPYLKYNHADAEFQEKLASDTSFGGNLGKAVFQAKKRILEPLGLVETPDKTAPAAKKRPLEQSPQEPDSSSGVGKKGKQPARKRLNFDDEPGAGDGPPPEGPSSGAMSTETEMRAAAGGNGGDAGQGAEGVGNASGDWHCDSTWSESHVTTTSTRTWVLPTYNNHLYLRLGSSNASDTFNGFSTPWGYFDFNRFHCHFSPRDWQRLINNHWGLRPKSMQVRIFNIQVKEVTTSNGETTVSNNLTSTVHIFADSTYELPYVMDAGQEGSLPPFPNDVFMVPQYGYCGLVTGGSSQNQTDRNAFYCLEYFPSQMLRTGNNFEMVYKFENVPFHSMYAHSQSLDRLMNPLLDQYLWELQSTTSGGTLNQGNSATNFAKLTNKNFSGYRKNWLPGPMMKQQRFSKTASQNYKIPQGGNNSLLHYETRTTLDRRWSNFAPGTAMATAANDATDFSQAQLIFAGPNITGNTTTDANNLMFTSEDELRATNPRDTDLFGHLATNQQNATTVPTVDDVDGVGVYPGMVWQDRDIYYQGPIWAKIPHTDGHFHPSPLIGGFGLKSPPPQIFIKNTPVPANPATTFSPARINSFITQYSTGQVAVKIEWEIQKERSKRWNPEVQFTSNYGAQDSLLWAPDNAGAYKEPRAIGSRYLTNHL

SEQ ID NO: 889 - protein, 736 aa, synthetic construct
  source 1..736: note = Description of Artificial Sequence: Synthetic polypeptide
MSFVDHPPDWLESIGDGFREFLGLEAGPPKPKANQQKQDNARGLVLPGYKYLGPGNGLDKGDPVNFADEVAREHDLSYQKQLEAGDNPYLKYNHADAEFQEKLASDTSFGGNLGKAVFQAKKRILEPLGLVETPDKTAPAAKKRPLEQSPQEPDSSSGVGKKGKQPARKRLNFDDEPGAGDGPPPEGPSSGAMSTETEMRAAAGGNGGDAGQGAEGVGNASGDWHCDSTWSESHVTTTSTRTWVLPTYNNHLYLRLGSSNASDTFNGFSTPWGYFDFNRFHCHFSPRDWQRLINNHWGLRPKSMQVRIFNIQVKEVTTSNGETTVSNNLTSTVQIFADSTYELPYVMDAGQEGSLPPFPNDVFMVPQYGYCGLVTGGSSQNQTDRNAFYCLEYFPSQMLRTGNNFEMVYKFENVPFHSMYAHSQSLDRLMNPLLDQYLWELQSTTSGGTLNQGNSATNFAKLTKTNFSGYRKNWLPGPMMKQQRFSKTASQNYKIPQGRNNSLLHYETRTTLDGRWSNFAPGTAMATAANDATDFSQAQLIFAGPNITGNTTTDANNLMFTSEDELRATNPRDTDLFGHLATNQQNATTVPTVDDVDGVGVYPGMVWQDRDIYYQGPIWAKIPHTDGHFHPSPLIGGFGLKSPPPQIFIKNTPVPANPATTFSPARINSFITQYSTGQVAVKIEWEIQKERSKRWNPEVQFTSNYGAQDSLLWAPDNAGAYKEPRAIGSRYLTNHL

SEQ ID NO: 890 - protein, 736 aa, unidentified; identical to SEQ ID NO: 889
  source 1..736: note = Bovine adeno-associated virus

SEQ ID NO: 891 - protein, 600 aa, unidentified
  source 1..600: note = Bovine adeno-associated virus
TAPAAKKRPLEQSPQEPDSSSGVGKKGKQPARKRLNFDDEPGAGDGPPPEGPSSGAMSTETEMRAAAGGNGGDAGQGAEGVGNASGDWHCDSTWSESHVTTTSTRTWVLPTYNNHLYLRLGSSNASDTFNGFSTPWGYFDFNRFHCHFSPRDWQRLINNHWGLRPKSMQVRIFNIQVKEVTTSNGETTVSNNLTSTVQIFADSTYELPYVMDAGQEGSLPPFPNDVFMVPQYGYCGLVTGGSSQNQTDRNAFYCLEYFPSQMLRTGNNFEMVYKFENVPFHSMYAHSQSLDRLMNPLLDQYLWELQSTTSGGTLNQGNSATNFAKLTKTNFSGYRKNWLPGPMMKQQRFSKTASQNYKIPQGRNNSLLHYETRTTLDGRWSNFAPGTAMATAANDATDFSQAQLIFAGPNITGNTTTDANNLMFTSEDELRATNPRDTDLFGHLATNQQNATTVPTVDDVDGVGVYPGMVWQDRDIYYQGPIWAKIPHTDGHFHPSPLIGGFGLKSPPPQIFIKNTPVPANPATTFSPARINSFITQYSTGQVAVKIEWEIQKERSKRWNPEVQFTSNYGAQDSLLWAPDNAGAYKEPRAIGSRYLTNHL

SEQ ID NO: 892 - DNA, 2214 bp, synthetic construct
  source 1..2214: mol_type = other DNA; note = Description of Artificial Sequence: Synthetic polynucleotide
atggctgccgatggttatcttccagattggctcgaggacactctctctgaaggaataagacagtggtggaagctcaaacctggcccaccaccaccaaagcccgcagagcggcataaggacgacagcaggggtcttgtgcttcctgggtacaagtacctcggacccttcaacggactcgacaagggagagccggtcaacgaggcagacgccgcggccctcgagcacgacaaagcctacgaccggcagctcgacagcggagacaacccgtacctcaagtacaaccacgccgacgcggagtttcaggagcgccttaaagaagatacgtcttttgggggcaacctcgggcgagcagtcttccaggccaaaaagaggcttcttgaacctcttggtctggttgaggaagcggctaagacggctcctggaaagaagaggcctgtagagcagtctcctcaggaaccggactcctcctcgggcatcggcaagacaggccagcagcccgctaaaaagagactcaatttcggtcagactggcgacacagagtcagtcccagaccctcaaccaatcggagaacctcccgcagccccctcaggtgtgggatctcttacaatggcttcaggtggtggcgcaccagtggcagacaataacgaaggtgccgatggagtgggtagttcctcgggaaattggcattgcgattcccaatggctgggggacagagtcatcaccaccagcacccgaacctgggccctgcccacctacaacaatcacctctacaagcaaatctccaacgggacatcgggaggagccaccaacgacaacacctacttcggctacagcaccccctgggggtattttgactttaacagattccactgccacttttcaccacgtgactggcagcgactcatcaacaacaactggggattccggcccaagagactcagcttcaagctcttcaacatccaggtcaaggaggtcacgcagaatgaaggcaccaagaccatcgccaataaccttaccagcacggtccaggtcttcacggactcggagtaccagctgccgtacgttctcggctctgcccaccagggctgcctgcctccgttcccggcggacgtgttcatgattccccagtacggctacctaacactcaacaacggtagtcaggccgtgggacgctcctccttctactgcctggaatactttccttcgcagatgctgagaaccggcaacaacttccagtttacttacaccttcgaggacgtgcctttccacagcagctacgcccacagccagagcttggaccggctgatgaatcctctgattgaccagtacctgtactacttgtctcggactcaaacaacaggaggcacggcaaatacgcagactctgggcttcagccaaggtgggcctaatacaatggccaatcaggcaaagaactggctgccaggaccctgttaccgccaacaacgcgtctcaacgacaaccgggcaaaacaacaatagcaactttgcctggactgctgggaccaaataccatctgaatggaagaaattcattggctaatcctggcatcgctatggcaacacacaaagacgacaaggagcgtttttttcccagtaacgggatcctgatttttggcaaacaaaatgctgccagagacaatgcggattacagcgatgtcatgctcaccagcgaggaagaaatcaaaaccactaaccctgtggctacagaggaatacggtatcgtggcagataacttgcagcagcaaaacacggctcctcaaattggaactgtcaacagccagggggccttacccggtatggtttggcagaaccgggacgtgtacctgcagggtcccatctgggccaagattcctcacacggacggcaacttccacccgtctccgctgatgggcggctttggcctgaaacatcctccgcctcagatcctgatcaagaacacgcctgtacctgcggatcctccgaccaccttcaaccagtcaaagctgaactctttcatcacgcaatacagcaccggacaggtcagcgtggaaattgaatgggagctgcagaaggaaaacagcaagcgctggaaccccgagatccagtacacctccaactactacaaatctacaagtgtggactttgctgttaatacagaaggcgtgtactctgaaccccaccccattggcacccgttacctcacccgtcccctgtaa

SEQ ID NO: 893 - protein, 737 aa, synthetic construct
  source 1..737: note = Description of Artificial Sequence: Synthetic polypeptide
MAADGYLPDWLEDTLSEGIRQWWKLKPGPPPPKPAERHKDDSRGLVLPGYKYLGPFNGLDKGEPVNEADAAALEHDKAYDRQLDSGDNPYLKYNHADAEFQERLKEDTSFGGNLGRAVFQAKKRLLEPLGLVEEAAKTAPGKKRPVEQSPQEPDSSSGIGKTGQQPAKKRLNFGQTGDTESVPDPQPIGEPPAAPSGVGSLTMASGGGAPVADNNEGADGVGSSSGNWHCDSQWLGDRVITTSTRTWALPTYNNHLYKQISNGTSGGATNDNTYFGYSTPWGYFDFNRFHCHFSPRDWQRLINNNWGFRPKRLSFKLFNIQVKEVTQNEGTKTIANNLTSTVQVFTDSEYQLPYVLGSAHQGCLPPFPADVFMIPQYGYLTLNNGSQAVGRSSFYCLEYFPSQMLRTGNNFQFTYTFEDVPFHSSYAHSQSLDRLMNPLIDQYLYYLSRTQTTGGTANTQTLGFSQGGPNTMANQAKNWLPGPCYRQQRVSTTTGQNNNSNFAWTAGTKYHLNGRNSLANPGIAMATHKDDKERFFPSNGILIFGKQNAARDNADYSDVMLTSEEEIKTTNPVATEEYGIVADNLQQQNTAPQIGTVNSQGALPGMVWQNRDVYLQGPIWAKIPHTDGNFHPSPLMGGFGLKHPPPQILIKNTPVPADPPTTFNQSKLNSFITQYSTGQVSVEIEWELQKENSKRWNPEIQYTSNYYKSTSVDFAVNTEGVYSEPHPIGTRYLTRPL

SEQ ID NO: 894 - protein, 736 aa, synthetic construct
  source 1..736: note = Description of Artificial Sequence: Synthetic polypeptide
MAADGYLPDWLEDNLSEGIREWWDLKPGAPKPKANQQKQDDGRGLVLPGYKYLGPFNGLDKGEPVNAADAAALEHDKAYDQQLKAGDNPYLRYNHADAEFQERLQEDTSFGGNLGRAVFQAKKRVLEPLGLVEEGAKTAPGKKRPVEQSPQEPDSSSGIGKTGQQPAKKRLNFGQTGDTESVPDPQPIGEPPAAPSGVGSLTMASGGGAPVADNNEGADGVGSSSGNWHCDSQWLGDRVITTSTRTWALPTYNNHLYKQISSASTGASNDNHYFGYSTPWGYFDFNRFHCHFSPRDWQRLINNNWGFRPKRLNFKLFNIQVKEVTDNNGVKTIANNLTSTVQVFTDSDYQLPYVLGSAHQGCLPPFPADVFMIPQYGYLTLNNGSQAVGRSSFYCLEYFPSQMLRTGNNFQFTYTFEDVPFHSSYAHSQSLDRLMNPLIDQYLYYLSRTQTTGGTANTQTLGFSQGGPNTMANQAKNWLPGPCYRQQRVSTTTGQNNNSNFAWTAGTKYHLNGRNSLANPGIAMATHKDDKERFFPSNGILIFGKQNAARDNADYSDVMLTSEEEIKTTNPVATEEYGIVADNLQQQNTAPQIGTVNSQGALPGMVWQNRDVYLQGPIWAKIPHTDGNFHPSPLMGGFGLKHPPPQILIKNTPVPADPPTTFNQSKLNSFITQYSTGQVSVEIEWELQKENSKRWNPEIQYTSNYYKSTSVDFAVNTEGVYSEPHPIGTRYLTRPL

SEQ ID NO: 895 - protein, 736 aa, synthetic construct
  source 1..736: note = Description of Artificial Sequence: Synthetic polypeptide
MAADGYLPDWLEDTLSEGIRQWWKLKPGPPPPKPAERHKDDSRGLVLPGYKYLGPFNGLDKGEPVNEADAAALEHDKAYDRQLDSGDNPYLKYNHADAEFQERLQGDTSFGGNLGRAVFQAKKRVLEPLGLVEEGAKTAPGKKRPVEQSPQEPDSSSGIGETGQQPAKKRLNFGQTGDSESVPDPQPLGEPPATPAAVGPTTMASGGGAPMADNNEGADGVGSSSGNWHCDSQWLGDRVITTSTRTWALPTYNNHLYKQISSASTGASNDNHYFGYSTPWGYFDFNRFHCHFSPRDWQRLINNNWGFRPKRLSFKLFNIQVKEVTDNNGVKTIANNLTSTVQVFTDSEYQLPYVLGSAHQGCLPPFPADVFMIPQYGYLTLNNGSQAVGRSSFYCLEYFPSQMLRTGNNFTFSYTFEDVPFHSSYAHSQSLDRLMNPLIDQYLYYLSRTQTTGGTANTQTLGFSQGGPNTMANQAKNWLPGPCYRQQRVSTTTGQNNNSNFAWTAGTKYHLNGRNSLANPGIAMATHKDDKERFFPSNGILIFGKQNAARDNADYSDVMLTSEEEIKTTNPVATEEYGIVADNLQQQNTAPQIGTVNSQGALPGMVWQNRDVYLQGPIWAKIPHTDGNFHPSPLMGGFGLKHPPPQILIKNTPVPADPPTTFNQSKLNSFITQYSTGQVSVEIEWELQKENSKRWNPEIQYTSNYYKSTSVDFAVNTEGVYSEPHPIGTRYLTRPL

SEQ ID NO: 896 - DNA, 2181 bp, synthetic construct
  source 1..2181: mol_type = other DNA; note = Description of Artificial Sequence: Synthetic polynucleotide
atgtcttttgttgatcaccctccagattggttggaagaagttggtgaaggtcttcgcgagtttttgggccttgaagcgggcccaccgaaaccaaaacccaatcagcagcatcaagatcaagcccgtggtcttgtgctgcctggttataactatctcggacccggaaacggtctcgatcgaggagagcctgtcaacagggcagacgaggtcgcgcgagagcacgacatctcgtacaacgagcagcttgaggcgggagacaacccctacctcaagtacaaccacgcggacgccgagtttcaggagaagctcgccgacgacacatccttcgggggaaacctcggaaaggcagtctttcaggccaagaaaagggttctcgaaccttttggcctggttgaagagggtgctaagacggcccctaccggaaagcggatagacgaccactttccaaaaagaaagaaggctcggaccgaagaggactccaagccttccacctcgtcagacgccgaagctggacccagcggatcccagcagctgcaaatcccagcacaaccagcctcaagtttgggagctgatacaatgtctgcgggaggtggcggcccattgggcgacaataaccaaggtgccgatggagtgggcaatgcctcgggagattggcattgcgattccacgtggatgggggacagagtcgtcaccaagtccacccgcacctgggtgctgcccagctacaacaaccaccagtaccgagagatcaaaagcggctccgtcgacggaagcaacgccaacgcctactttggatacagcaccccctgggggtactttgactttaaccgcttccacagccactggagcccccgagactggcaaagactcatcaacaactattggggcttcagaccccggtctctcagagtcaaaatcttcaacatccaagtcaaagaggtcacggtgcaggactccaccaccaccatcgccaacaacctcacctccaccgtccaagtgtttacggacgacgactaccaactcccgtacgtcgtcggcaacgggaccgagggatgcctgccggccttccccccgcaggtctttacgctgccgcagtacggctacgcgacgctgaaccgagacaacggagacaacccgacagagcggagcagcttcttttgcctagagtactttcccagcaagatgctgaggacgggcaacaactttgagtttacctacagctttgaagaggtgcccttccactgcagcttcgccccgagccagaacctctttaagctggccaacccgctggtggaccagtacctgtaccgcttcgtgagcacctcggccacgggcgccatccagttccaaaagaacctggcgggcagatacgccaacacctacaaaaactggttcccggggcccatgggccgaacccagggctggaacacgagctctggggtcagcagcaccaacagagtcagcgtcaacaacttttccgtctcaaaccggatgaacctggagggggccagctaccaagtgaacccccagcccaacgggatgacaaacacgctccaaggcagcaaccgctacgcgctggaaaacaccatgatcttcaacgctcaaaacgccacgccgggaactacctcggtgtacccagaggacaatctactgctgaccagcgagagcgagactcagcccgtcaaccgggtggcttacaacacgggcggtcagatggccaccaacgcccagaacgccaccacggctcccacggtcgggacctacaacctccaggaagtgcttcctggcagcgtatggatggagagggacgtgtacctccaaggacccatctgggccaagatcccagagacgggggcgcactttcacccctctccggccatgggcggattcggactcaaacacccgccgcccatgatgctcatcaaaaacacgccggtgcccggcaacatcaccagcttctcggacgtgcccgtcagcagcttcatcacccagtacagcaccgggcaggtcaccgtggagatggaatgggagctcaaaaaggaaaactccaagaggtggaacccagagatccagtacaccaacaactacaacgacccccagtttgtggactttgctccagacggctccggcgaatacagaaccaccagagccatcggaacccgatacctcacccgacccctt

SEQ ID NO: 897 - protein, 726 aa, synthetic construct
  source 1..726: note = Description of Artificial Sequence: Synthetic polypeptide
MSFVDHPPDWLEEVGEGLREFLGLEAGPPKPKPNQQHQDQARGLVLPGYNYLGPGNGLDRGEPVNRADEVAREHDISYNEQLEAGDNPYLKYNHADAEFQEKLADDTSFGGNLGKAVFQAKKRVLEPFGLVEEGAKTAPTGKRIDDHFPKRKKARTEEDSKPSTSSDAEAGPSGSQQLQIPAQPASSLGADTMSAGGGGPLGDNNQGADGVGNASGDWHCDSTWMGDRVVTKSTRTWVLPSYNNHQYREIKSGSVDGSNANAYFGYSTPWGYFDFNRFHSHWSPRDWQRLINNYWGFRPRSLRVKIFNIQVKEVTVQDSTTTIANNLTSTVQVFTDDDYQLPYVVGNGTEGCLPAFPPQVFTLPQYGYATLNRDNGDNPTERSSFFCLEYFPSKMLRTGNNFEFTYSFEEVPFHCSFAPSQNLFKLANPLVDQYLYRFVSTSATGAIQFQKNLAGRYANTYKNWFPGPMGRTQGWNTSSGSSTNRVSVNNFSVSNRMNLEGASYQVNPQPNGMTNTLQGSNRYALENTMIFNAQNATPGTTSVYPEDNLLLTSESETQPVNRVAYNTGGQMATNAQNATTAPTVGTYNLQEVLPGSVWMERDVYLQGPIWAKIPETGAHFHPSPAMGGFGLKHPPPMMLIKNTPVPGNITSFSDVPVSSFITQYSTGQVTVEMEWELKKENSKRWNPEIQYTNNYNDPQFVDFAPDGSGEYRTTRAIGTRYLTRPL

SEQ ID NO: 898 - protein, 735 aa, synthetic construct
  source 1..735: note = Description of Artificial Sequence: Synthetic polypeptide
MAADGYLPDWLEDTLSEGIRQWWKLKPGPPPPKPAERHKDDSRGLVLPGYKYLGPFNGLDKGEPVNEADAAALEHDKAYDRQLDSGDNPYLKYNHADAEFQERLKEDTSFGGNLGRAVFQAKKRILEPLGLVEEPVKTAPGKKRPVEHSPAEPDSSSGTGKSGQQPARKRLNFGQTGDADSVPDPQPLGQPPAAPSGLGTNTMASGSGAPMADNNEGADGVGNSSGNWHCDSTWMGDRVITTSTRTWALPTYNNHLYKQISSQSGASNDNHYFGYSTPWGYFDFNRFHCHFSPRDWQRLINNNWGFRPKRLSFKLFNIQVKEVTQNDGTTTIANNLTSTVQVFTDSEYQLPYVLGSAHQGCLPPFPADVFMVPQYGYLTLNNGSQAVGRSSFYCLEYFPSQMLRTGNNFTFSYTFEDVPFHSSYAHSQSLDRLMNPLIDQYLYYLSRTNTPSGTTTMSRLQFSQAGASDIRDQSRNWLPGPCYRQQRVSKTAADNNNSDYSWTGATKYHLNGRDSLVNPGPAMASHKDDEEKYFPQSGVLIFGKQDSGKTNVDIEKVMITDEEEIRTTNPVATEQYGSVSTNLQSGNTQAATSDVNTQGVLPGMVWQDRDVYLQGPIWAKIPHTDGHFHPSPLMGGFGLKHPPPQILIKNTPVPANPSTTFSAAKFASFITQYSTGQVSVEIEWELQKENSKRWNPEIQYTSNYNKSVNVDFTVDTNGVYSEPRPIGTRYLTRNL

SEQ ID NO: 899 - DNA, 1797 bp, synthetic construct
  source 1..1797: mol_type = other DNA; note = Description of Artificial Sequence: Synthetic polynucleotide
acggctccgaccggagacaagcggaaaggcgaagacgaacctcgtttgcccgacacttcttcacagactcccaagaaaaacaagaagcctcgcaaggaaagaccttccggcggggcagaagatccgggcgaaggcacctcttccaacgctggagcagcagcacccgcctctagtgtgggatcatctatcatggctgaaggaggtggcggcccagtgggcgatgcaggccagggtgccgatggagtgggcaattcctccggaaattggcattgcgattcccaatggctggaaaacggagtcgtcactcgaaccacccgaacctgggtcttgcccagctacaacaaccacctgtacaaacgaatccaaggacccagcggaggcgacaacaacaacaaattctttggattcagcaccccctggggatactttgactacaatcgattccactgccacttttccccgcgagactggcaacgactcatcaacaacaactggggcatccgtcccaaagcgatgcgctttagactctttaacatccaggttaaagaggtcacggtccaagacttcaacaccaccatcggcaacaacctcaccagtacggtccaggtctttgcggacaaggactaccaactgccgtacgtcctcggatcggctaccgaaggcaccttcccgccgttcccagcggatatctacacgatcccgcagtacgggtactgcacgctaaactacaacaacgaggcggtggatcgttcggccttctactgtctggactactttccctcagacatgctgcggacaggaaataactttgagtttacttacaccttcgaggacgttcctttccatagcatgtttgcccacaaccagacgctagaccggctgatgaatcccctcgtggatcagtacctctgggctttcagctccgtcagccaagcaggctcatctggacgagctcttcattactcgcgggcgactaaaaccaacatggcggctcaatataggaactggttacctgggcctttcttccgtgatcagcaaatctttacgggcgctagcaacatcactaaaaataacgtctttagcgtttgggaaaaaggcaagcaatgggaactcgacaatcggaccaacctaatgcagcccggtcctgcggcagcgaccacctttagcggagaacctgaccgtcaagccatgcaaaacacgctggcttttagcaggaccgtctacgatcaaacgaccgccacgaccgatcgtaaccagatactcatcaccaacgaagacgaaatcagacccaccaactcggtcggtatcgacgcgtggggagcagttcccaccaacaaccagtcgatcgtgacccccggcactcgcgcggccgtcaacaatcaaggggcgcttcccgggatggtgtggcaaaacagagacatttaccctacagggacccatttggccaaaattcccgacactgacaatcacttccatccgtccccgcttattgggcggtttggctgcaagcatccccctccccagattttcattaaaaacacacccgtccctgccaacccttcggaaacgttccagacggccaaagtggcctccttcatcaaccagtactcgaccggacagtgcaccgtcgaaatcttttgggaactcaagaaggaaacctccaagcgctggaaccccgaaatccagttcacctccaactttggcaacgcggccgacatccagtttgccgtctccgacacgggatcctattccgaacctcgtcccatcggtacccgttaccttaccaaacctctgtaa

SEQ ID NO: 900 - DNA, 1989 bp, synthetic construct
  source 1..1989: mol_type = other DNA; note = Description of Artificial Sequence: Synthetic polynucleotide
atgaggtcgtactacgaggtcatcgttcagctgcccaacgacgtcgagagtcaggtacctggaatctccgattcgttcgtcaactggattacgtcgcgagaatggacgttgcctgaggacgccgattgggatttggaccaggtcgatcaagttcaactgacgctcggcgacaaaatccaacgggagattcgaactcattgggggacgatggccaaagaaccggactttcactattttatccaactggaacaaggtgaggtgttctttcatttacacgtcctgctggaaacgtgttccgtaaagccgatggtactcggaagatatatccgacatattcaacaaaaaattgtgagtaaagtctactgcgccacgagcctacgatggaaggatggatgcgtggtgaccaagaccaaaaatttcgggggcgcgaacaaggtccgggccgagtcgtatattcccgcctacctgatcccgaaacagcaaccggaagtgcagtgggcgtggactaacgtgcccgagtatataaaagcgtgcttgcaccgagaactgcgtgccagtctcgcgcgacttcacttcgaggaggcgggcgtctcgcaatccaaggaaaatctcgcgagaactgcagacggcgctcccgtgatgccgacccgcgtcagcaaacgctacatggagctcgtggattggctcgtggagaaggggatcaccaccgagaaggaatggctgctggaaaacagagaaagctttcggagctttcaggcctcgagcaactcggcgcgtcagatcaagacggccctgcaaggcgccattcaggagatgcttctgaccaagacggcggaggactacctcgtcggaaaggatcccgtctcggacgacgacatccgtcagaaccgcatctacaagattctggaactgaaccactacgacccagcgtacgtggggagtattttggtcgggtggtgccagaagaaatggggcaagcgaaacacgctgtggctgttcggacatgcgaccaccggcaagaccaacatcgcggaggctattgcccatgctgtgccgttctatggatgcgttaactggaccaacgagaactttccgttcaacgactgcgtcgaaaaaatgattatctggtgggaggagggcaaaatgaccgccaaagtggtggaaacagccaaggcgattctgggaggatctcgggtgagagtggaccaaaaatgcaaagcttcggttccgatcgaaccgacgccggtcattattaccagtaacaccaacatgtgttatgtcatcgacgggaacacgaccacgttcgagcataagcagccgttggaggacaggatgtttaagctcgaattgctgactcggttgcctgatgactttggtaaggtgaccaaacaggaggtgcgtcaattcttcaggtggtctcaggatcacctgacccctgtgatcccagaattcctagtgcggaaggcggagtctcgcaaaagacccgccccttccggggaaggctatataagcccgacaaagcggcccgcgctcgcagagcagcagcaggcgtcggagagcgcggacccggttcccaccaggtatcgtatcaaatgctcgaaacattgcggtatggataaaatgttgtttccttgccaaatttgtgaatcgatgaacagagatattaatatttgtgctattcataaaacgaccgactgtaaagagtgtttccccgactacggggataaagatgatgtagaactacccccctgtacagaacacaacgtgtctcgttgttatcaatgtcattcgggcgaattgtatcgcgtgacttcggactctgacgagaaacctgcccccgagagtgatgaaggcaccgagccatcctatgctccctgcacgattcaccacctgatgggcaagagtcacgggttagtcacttgcgcggcgtgtcggttgaaaaatagtacgttgcatgatgacttggatgacggtgatctcgaacaataa

SEQ ID NO: 901 - DNA, 1626 bp, synthetic construct
  source 1..1626: mol_type = other DNA; note = Description of Artificial Sequence: Synthetic polynucleotide
atgaggtcgtactacgaggtcatcgttcagctgcccaacgacgtcgagagtcaggtacctggaatctccgattcgttcgtcaactggattacgtcgcgagaatggacgttgcctgaggacgccgattgggatttggaccaggtcgatcaagttcaactgacgctcggcgacaaaatccaacgggagattcgaactcattgggggacgatggccaaagaaccggactttcactattttatccaactggaacaaggtgaggtgttctttcatttacacgtcctgctggaaacgtgttccgtaaagccgatggtactcggaagatatatccgacatattcaacaaaaaattgtgagtaaagtctactgcgccacgagcctacgatggaaggatggatgcgtggtgaccaagaccaaaaatttcgggggcgcgaacaaggtccgggccgagtcgtatattcccgcctacctgatcccgaaacagcaaccggaagtgcagtgggcgtggactaacgtgcccgagtatataaaagcgtgcttgcaccgagaactgcgtgccagtctcgcgcgacttcacttcgaggaggcgggcgtctcgcaatccaaggaaaatctcgcgagaactgcagacggcgctcccgtgatgccgacccgcgtcagcaaacgctacatggagctcgtggattggctcgtggagaaggggatcaccaccgagaaggaatggctgctggaaaacagagaaagctttcggagctttcaggcctcgagcaactcggcgcgtcagatcaagacggccctgcaaggcgccattcaggagatgcttctgaccaagacggcggaggactacctcgtcggaaaggatcccgtctcggacgacgacatccgtcagaaccgcatctacaagattctggaactgaaccactacgacccagcgtacgtggggagtattttggtcgggtggtgccagaagaaatggggcaagcgaaacacgctgtggctgttcggacatgcgaccaccggcaagaccaacatcgcggaggctattgcccatgctgtgccgttctatggatgcgttaactggaccaacgagaactttccgttcaacgactgcgtcgaaaaaatgattatctggtgggaggagggcaaaatgaccgccaaagtggtggaaacagccaaggcgattctgggaggatctcgggtgagagtggaccaaaaatgcaaagcttcggttccgatcgaaccgacgccggtcattattaccagtaacaccaacatgtgttatgtcatcgacgggaacacgaccacgttcgagcataagcagccgttggaggacaggatgtttaagctcgaattgctgactcggttgcctgatgactttggtaaggtgaccaaacaggaggtgcgtcaattcttcaggtggtctcaggatcacctgacccctgtgatcccagaattcctagtgcggaaggcggagtctcgcaaaagacccgccccttccggggaaggctatataagcccgacaaagcggcccgcgctcgcagagcagcagcaggcgtcggagagcgcggacccggttcccaccagattggttggagcggttggtcaaaaagggagtgaatgctgcagctga

SEQ ID NO: 902 - DNA, 1323 bp, synthetic construct
  source 1..1323: mol_type = other DNA; note = Description of Artificial Sequence: Synthetic polynucleotide
atggagctcgtggattggctcgtggagaaggggatcaccaccgagaaggaatggctgctggaaaacagagaaagctttcggagctttcaggcctcgagcaactcggcgcgtcagatcaagacggccctgcaaggcgccattcaggagatgcttctgaccaagacggcggaggactacctcgtcggaaaggatcccgtctcggacgacgacatccgtcagaaccgcatctacaagattctggaactgaaccactacgacccagcgtacgtggggagtattttggtcgggtggtgccagaagaaatggggcaagcgaaacacgctgtggctgttcggacatgcgaccaccggcaagaccaacatcgcggaggctattgcccatgctgtgccgttctatggatgcgttaactggaccaacgagaactttccgttcaacgactgcgtcgaaaaaatgattatctggtgggaggagggcaaaatgaccgccaaagtggtggaaacagccaaggcgattctgggaggatctcgggtgagagtggaccaaaaatgcaaagcttcggttccgatcgaaccgacgccggtcattattaccagtaacaccaacatgtgttatgtcatcgacgggaacacgaccacgttcgagcataagcagccgttggaggacaggatgtttaagctcgaattgctgactcggttgcctgatgactttggtaaggtgaccaaacaggaggtgcgtcaattcttcaggtggtctcaggatcacctgacccctgtgatcccagaattcctagtgcggaaggcggagtctcgcaaaagacccgccccttccggggaaggctatataagcccgacaaagcggcccgcgctcgcagagcagcagcaggcgtcggagagcgcggacccggttcccaccaggtatcgtatcaaatgctcgaaacattgcggtatggataaaatgttgtttccttgccaaatttgtgaatcgatgaacagagatattaatatttgtgctattcataaaacgaccgactgtaaagagtgtttccccgactacggggataaagatgatgtagaactacccccctgtacagaacacaacgtgtctcgttgttatcaatgtcattcgggcgaattgtatcgcgtgacttcggactctgacgagaaacctgcccccgagagtgatgaaggcaccgagccatcctatgctccctgcacgattcaccacctgatgggcaagagtcacgggttagtcacttgcgcggcgtgtcggttgaaaaatagtacgttgcatgatgacttggatgacggtgatctcgaacaataa

SEQ ID NO: 903 - DNA, 960 bp, synthetic construct
  source 1..960: mol_type = other DNA; note = Description of Artificial Sequence: Synthetic polynucleotide
atggagctcgtggattggctcgtggagaaggggatcaccaccgagaaggaatggctgctggaaaacagagaaagctttcggagctttcaggcctcgagcaactcggcgcgtcagatcaagacggccctgcaaggcgccattcaggagatgcttctgaccaagacggcggaggactacctcgtcggaaaggatcccgtctcggacgacgacatccgtcagaaccgcatctacaagattctggaactgaaccactacgacccagcgtacgtggggagtattttggtcgggtggtgccagaagaaatggggcaagcgaaacacgctgtggctgttcggacatgcgaccaccggcaagaccaacatcgcggaggctattgcccatgctgtgccgttctatggatgcgttaactggaccaacgagaactttccgttcaacgactgcgtcgaaaaaatgattatctggtgggaggagggcaaaatgaccgccaaagtggtggaaacagccaaggcgattctgggaggatctcgggtgagagtggaccaaaaatgcaaagcttcggttccgatcgaaccgacgccggtcattattaccagtaacaccaacatgtgttatgtcatcgacgggaacacgaccacgttcgagcataagcagccgttggaggacaggatgtttaagctcgaattgctgactcggttgcctgatgactttggtaaggtgaccaaacaggaggtgcgtcaattcttcaggtggtctcaggatcacctgacccctgtgatcccagaattcctagtgcggaaggcggagtctcgcaaaagacccgccccttccggggaaggctatataagcccgacaaagcggcccgcgctcgcagagcagcagcaggcgtcggagagcgcggacccggttcccaccagattggttggagcggttggtcaaaaagggagtgaatgctgcagctga

SEQ ID NO: 904 - DNA, 1608 bp, synthetic construct
  source 1..1608: mol_type = other DNA; note = Description of Artificial Sequence: Synthetic polynucleotide
atggctgaaggaggtggcggcccagtgggcgatgcaggccagggtgccgatggagtgggcaattcctccggaaattggcattgcgattcccaatggctggaaaacggagtcgtcactcgaaccacccgaacctgggtcttgcccagctacaacaaccacctgtacaaacgaatccaaggacccagcggaggcgacaacaacaacaaattctttggattcagcaccccctggggatactttgactacaatcgattccactgccacttttccccgcgagactggcaacgactcatcaacaacaactggggcatccgtcccaaagcgatgcgctttagactctttaacatccaggttaaagaggtcacggtccaagacttcaacaccaccatcggcaacaacctcaccagtacggtccaggtctttgcggacaaggactaccaactgccgtacgtcctcggatcggctaccgaaggcaccttcccgccgttcccagcggatatctacacgatcccgcagtacgggtactgcacgctaaactacaacaacgaggcggtggatcgttcggccttctactgtctggactactttccctcagacatgctgcggacaggaaataactttgagtttacttacaccttcgaggacgttcctttccatagcatgtttgcccacaaccagacgctagaccggctgatgaatcccctcgtggatcagtacctctgggctttcagctccgtcagccaagcaggctcatctggacgagctcttcattactcgcgggcgactaaaaccaacatggcggctcaatataggaactggttacctgggcctttcttccgtgatcagcaaatctttacgggcgctagcaacatcactaaaaataacgtctttagcgtttgggaaaaaggcaagcaatgggaactcgacaatcggaccaacctaatgcagcccggtcctgcggcagcgaccacctttagcggagaacctgaccgtcaagccatgcaaaacacgctggcttttagcaggaccgtctacgatcaaacgaccgccacgaccgatcgtaaccagatactcatcaccaacgaagacgaaatcagacccaccaactcggtcggtatcgacgcgtggggagcagttcccaccaacaaccagtcgatcgtgacccccggcactcgcgcggccgtcaacaatcaaggggcgcttcccgggatggtgtggcaaaacagagacatttaccctacagggacccatttggccaaaattcccgacactgacaatcacttccatccgtccccgcttattgggcggtttggctgcaagcatccccctccccagattttcattaaaaacacacccgtccctgccaacccttcggaaacgttccagacggccaaagtggcctccttcatcaaccagtactcgaccggacagtgcaccgtcgaaatcttttgggaactcaagaaggaaacctccaagcgctggaaccccgaaatccagttcacctccaactttggcaacgcggccgacatccagtttgccgtctccgacacgggatcctattccgaacctcgtcccatcggtacccgttaccttaccaaacctctgtaa

SEQ ID NO: 905 - DNA, 2232 bp, synthetic construct
  source 1..2232: mol_type = other DNA; note = Description of Artificial Sequence: Synthetic polynucleotide
atgtctctcatttctgatgcgattccagattggttggagcggttggtcaaaaagggagtgaatgctgcagctgatttctaccatttggaaagcggtcctcctcgtcctaaggcaaatcagcaaactcaagaatctcttgaaaaggacgattcgagaggtctcgtgttcccaggctacaattatctaggccctttcaacggtctagataaaggagaacccgtcaacgaggcagacgctgccgccttagaacacgacaaggcttacgacctcgaaatcaaggacgggcacaacccgtactttgagtacaacgaggccgacagacgtttccaggaacgtctcaaagacgatacctcctttggaggcaatttaggtaaagccatcttccaggccaaaaagagggttctcgaaccctttggtctggtggaagactcaaagacggctccgaccggagacaagcggaaaggcgaagacgaacctcgtttgcccgacacttcttcacagactcccaagaaaaacaagaagcctcgcaaggaaagaccttccggcggggcagaagatccgggcgaaggcacctcttccaacgctggagcagcagcacccgcctctagtgtgggatcatctatcatggctgaaggaggtggcggcccagtgggcgatgcaggccagggtgccgatggagtgggcaattcctccggaaattggcattgcgattcccaatggctggaaaacggagtcgtcactcgaaccacccgaacctgggtcttgcccagctacaacaaccacctgtacaaacgaatccaaggacccagcggaggcgacaacaacaacaaattctttggattcagcaccccctggggatactttgactacaatcgattccactgccacttttccccgcgagactggcaacgactcatcaacaacaactggggcatccgtcccaaagcgatgcgctttagactctttaacatccaggttaaagaggtcacggtccaagacttcaacaccaccatcggcaacaacctcaccagtacggtccaggtctttgcggacaaggactaccaactgccgtacgtcctcggatcggctaccgaaggcaccttcccgccgttcccagcggatatctacacgatcccgcagtacgggtactgcacgctaaactacaacaacgaggcggtggatcgttcggccttctactgtctggactactttccctcagacatgctgcggacaggaaataactttgagtttacttacaccttcgaggacgttcctttccatagcatgtttgcccacaaccagacgctagaccggctgatgaatcccctcgtggatcagtacctctgggctttcagctccgtcagccaagcaggctcatctggacgagctcttcattactcgcgggcgactaaaaccaacatggcggctcaatataggaactggttacctgggcctttcttccgtgatcagcaaatctttacgggcgctagcaacatcactaaaaataacgtctttagcgtttgggaaaaaggcaagcaatgggaactcgacaatcggaccaacctaatgcagcccggtcctgcggcagcgaccacctttagcggagaacctgaccgtcaagccatgcaaaacacgctggcttttagcaggaccgtctacgatcaaacgaccgccacgaccgatcgtaaccagatactcatcaccaacgaagacgaaatcagacccaccaactcggtcggtatcgacgcgtggggagcagttcccaccaacaaccagtcgatcgtgacccccggcactcgcgcggccgtcaacaatcaaggggcgcttcccgggatggtgtggcaaaacagagacatttaccctacagggacccatttggccaaaattcccgacactgacaatcacttccatccgtccccgcttattgggcggtttggctgcaagcatccccctccccagattttcattaaaaacacacccgtccctgccaacccttcggaaacgttccagacggccaaagtggcctccttcatcaaccagtactcgaccggacagtgcaccgtcgaaatcttttgggaactcaagaaggaaacctccaagcgctggaaccccgaaatccagttcacctccaactttggcaacgcggccgacatccagtttgccgtctccgacacgggatcctattccgaacctcgtcccatcggtacccgttaccttaccaaacctctgtaa

SEQ ID NO: 906 - protein, 535 aa, synthetic construct
  source 1..535: note = Description of Artificial Sequence: Synthetic polypeptide
MAEGGGGPVGDAGQGADGVGNSSGNWHCDSQWLENGVVTRTTRTWVLPSYNNHLYKRIQGPSGGDNNNKFFGFSTPWGYFDYNRFHCHFSPRDWQRLINNNWGIRPKAMRFRLFNIQVKEVTVQDFNTTIGNNLTSTVQVFADKDYQLPYVLGSATEGTFPPFPADIYTIPQYGYCTLNYNNEAVDRSAFYCLDYFPSDMLRTGNNFEFTYTFEDVPFHSMFAHNQTLDRLMNPLVDQYLWAFSSVSQAGSSGRALHYSRATKTNMAAQYRNWLPGPFFRDQQIFTGASNITKNNVFSVWEKGKQWELDNRTNLMQPGPAAATTFSGEPDRQAMQNTLAFSRTVYDQTTATTDRNQILITNEDEIRPTNSVGIDAWGAVPTNNQSIVTPGTRAAVNNQGALPGMVWQNRDIYPTGTHLAKIPDTDNHFHPSPLIGRFGCKHPPPQIFIKNTPVPANPSETFQTAKVASFINQYSTGQCTVEIFWELKKETSKRWNPEIQFTSNFGNAADIQFAVSDTGSYSEPRPIGTRYLTKPL

SEQ ID NO: 907 - protein, 440 aa, synthetic construct
  source 1..440: note = Description of Artificial Sequence: Synthetic polypeptide
MELVDWLVEKGITTEKEWLLENRESFRSFQASSNSARQIKTALQGAIQEMLLTKTAEDYLVGKDPVSDDDIRQNRIYKILELNHYDPAYVGSILVGWCQKKWGKRNTLWLFGHATTGKTNIAEAIAHAVPFYGCVNWTNENFPFNDCVEKMIIWWEEGKMTAKVVETAKAILGGSRVRVDQKCKASVPIEPTPVIITSNTNMCYVIDGNTTTFEHKQPLEDRMFKLELLTRLPDDFGKVTKQEVRQFFRWSQDHLTPVIPEFLVRKAESRKRPAPSGEGYISPTKRPALAEQQQASESADPVPTRYRIKCSKHCGMDKMLFPCQICESMNRDINICAIHKTTDCKECFPDYGDKDDVELPPCTEHNVSRCYQCHSGELYRVTSDSDEKPAPESDEGTEPSYAPCTIHHLMGKSHGLVTCAACRLKNSTLHDDLDDGDLEQ

SEQ ID NO: 908 - protein, 319 aa, synthetic construct
  source 1..319: note = Description of Artificial Sequence: Synthetic polypeptide
MELVDWLVEKGITTEKEWLLENRESFRSFQASSNSARQIKTALQGAIQEMLLTKTAEDYLVGKDPVSDDDIRQNRIYKILELNHYDPAYVGSILVGWCQKKWGKRNTLWLFGHATTGKTNIAEAIAHAVPFYGCVNWTNENFPFNDCVEKMIIWWEEGKMTAKVVETAKAILGGSRVRVDQKCKASVPIEPTPVIITSNTNMCYVIDGNTTTFEHKQPLEDRMFKLELLTRLPDDFGKVTKQEVRQFFRWSQDHLTPVIPEFLVRKAESRKRPAPSGEGYISPTKRPALAEQQQASESADPVPTRLVGAVGQKGSECCS

SEQ ID NO: 909 - protein, 662 aa, synthetic construct
  source 1..662: note = Description of Artificial Sequence: Synthetic polypeptide
MRSYYEVIVQLPNDVESQVPGISDSFVNWITSREWTLPEDADWDLDQVDQVQLTLGDKIQREIRTHWGTMAKEPDFHYFIQLEQGEVFFHLHVLLETCSVKPMVLGRYIRHIQQKIVSKVYCATSLRWKDGCVVTKTKNFGGANKVRAESYIPAYLIPKQQPEVQWAWTNVPEYIKACLHRELRASLARLHFEEAGVSQSKENLARTADGAPVMPTRVSKRYMELVDWLVEKGITTEKEWLLENRESFRSFQASSNSARQIKTALQGAIQEMLLTKTAEDYLVGKDPVSDDDIRQNRIYKILELNHYDPAYVGSILVGWCQKKWGKRNTLWLFGHATTGKTNIAEAIAHAVPFYGCVNWTNENFPFNDCVEKMIIWWEEGKMTAKVVETAKAILGGSRVRVDQKCKASVPIEPTPVIITSNTNMCYVIDGNTTTFEHKQPLEDRMFKLELLTRLPDDFGKVTKQEVRQFFRWSQDHLTPVIPEFLVRKAESRKRPAPSGEGYISPTKRPALAEQQQASESADPVPTRYRIKCSKHCGMDKMLFPCQICESMNRDINICAIHKTTDCKECFPDYGDKDDVELPPCTEHNVSRCYQCHSGELYRVTSDSDEKPAPESDEGTEPSYAPCTIHHLMGKSHGLVTCAACRLKNSTLHDDLDDGDLEQ

SEQ ID NO: 910 - protein, 541 aa, synthetic construct
  source 1..541: note = Description of Artificial Sequence: Synthetic polypeptide
MRSYYEVIVQLPNDVESQVPGISDSFVNWITSREWTLPEDADWDLDQVDQVQLTLGDKIQREIRTHWGTMAKEPDFHYFIQLEQGEVFFHLHVLLETCSVKPMVLGRYIRHIQQKIVSKVYCATSLRWKDGCVVTKTKNFGGANKVRAESYIPAYLIPKQQPEVQWAWTNVPEYIKACLHRELRASLARLHFEEAGVSQSKENLARTADGAPVMPTRVSKRYMELVDWLVEKGITTEKEWLLENRESFRSFQASSNSARQIKTALQGAIQEMLLTKTAEDYLVGKDPVSDDDIRQNRIYKILELNHYDPAYVGSILVGWCQKKWGKRNTLWLFGHATTGKTNIAEAIAHAVPFYGCVNWTNENFPFNDCVEKMIIWWEEGKMTAKVVETAKAILGGSRVRVDQKCKASVPIEPTPVIITSNTNMCYVIDGNTTTFEHKQPLEDRMFKLELLTRLPDDFGKVTKQEVRQFFRWSQDHLTPVIPEFLVRKAESRKRPAPSGEGYISPTKRPALAEQQQASESADPVPTRLVGAVGQKGSECCS

SEQ ID NO: 911 - protein, 743 aa, synthetic construct
  source 1..743: note = Description of Artificial Sequence: Synthetic polypeptide
MSLISDAIPDWLERLVKKGVNAAADFYHLESGPPRPKANQQTQESLEKDDSRGLVFPGYNYLGPFNGLDKGEPVNEADAAALEHDKAYDLEIKDGHNPYFEYNEADRRFQERLKDDTSFGGNLGKAIFQAKKRVLEPFGLVEDSKTAPTGDKRKGEDEPRLPDTSSQTPKKNKKPRKERPSGGAEDPGEGTSSNAGAAAPASSVGSSIMAEGGGGPVGDAGQGADGVGNSSGNWHCDSQWLENGVVTRTTRTWVLPSYNNHLYKRIQGPSGGDNNNKFFGFSTPWGYFDYNRFHCHFSPRDWQRLINNNWGIRPKAMRFRLFNIQVKEVTVQDFNTTIGNNLTSTVQVFADKDYQLPYVLGSATEGTFPPFPADIYTIPQYGYCTLNYNNEAVDRSAFYCLDYFPSDMLRTGNNFEFTYTFEDVPFHSMFAHNQTLDRLMNPLVDQYLWAFSSVSQAGSSGRALHYSRATKTNMAAQYRNWLPGPFFRDQQIFTGASNITKNNVFSVWEKGKQWELDNRTNLMQPGPAAATTFSGEPDRQAMQNTLAFSRTVYDQTTATTDRNQILITNEDEIRPTNSVGIDAWGAVPTNNQSIVTPGTRAAVNNQGALPGMVWQNRDIYPTGTHLAKIPDTDNHFHPSPLIGRFGCKHPPPQIFIKNTPVPANPSETFQTAKVASFINQYSTGQCTVEIFWELKKETSKRWNPEIQFTSNFGNAADIQFAVSDTGSYSEPRPIGTRYLTKPL

SEQ ID NO: 912 - protein, 598 aa, synthetic construct
  source 1..598: note = Description of Artificial Sequence: Synthetic polypeptide
TAPTGDKRKGEDEPRLPDTSSQTPKKNKKPRKERPSGGAEDPGEGTSSNAGAAAPASSVGSSIMAEGGGGPVGDAGQGADGVGNSSGNWHCDSQWLENGVVTRTTRTWVLPSYNNHLYKRIQGPSGGDNNNKFFGFSTPWGYFDYNRFHCHFSPRDWQRLINNNWGIRPKAMRFRLFNIQVKEVTVQDFNTTIGNNLTSTVQVFADKDYQLPYVLGSATEGTFPPFPADIYTIPQYGYCTLNYNNEAVDRSAFYCLDYFPSDMLRTGNNFEFTYTFEDVPFHSMFAHNQTLDRLMNPLVDQYLWAFSSVSQAGSSGRALHYSRATKTNMAAQYRNWLPGPFFRDQQIFTGASNITKNNVFSVWEKGKQWELDNRTNLMQPGPAAATTFSGEPDRQAMQNTLAFSRTVYDQTTATTDRNQILITNEDEIRPTNSVGIDAWGAVPTNNQSIVTPGTRAAVNNQGALPGMVWQNRDIYPTGTHLAKIPDTDNHFHPSPLIGRFGCKHPPPQIFIKNTPVPANPSETFQTAKVASFINQYSTGQCTVEIFWELKKETSKRWNPEIQFTSNFGNAADIQFAVSDTGSYSEPRPIGTRYLTKPL

SEQ ID NO: 913 - DNA, 4694 bp, synthetic construct
  source 1..4694: mol_type = other DNA; note = Description of Artificial Sequence: Synthetic polynucleotide
tggccagtttccaagacaggctcgctcgctcactcgggccggggccccaaaggggcccctagcgaccgcttcgcggtcgcggcccgagtgagcgagcgagcctgtcttggaaactggccagcactccggtgaggtaatgccgtcacgtggtcgggaatgggaacgggaaatctcgcgagaacgtaaacaaatataagacggcgccacacggcgctgcgtcatacgcgcgcgcgcaccggcgagatgaggtcgtactacgaggtcatcgttcagctgcccaacgacgtcgagagtcaggtacctggaatctccgattcgttcgtcaactggattacgtcgcgagaatggacgttgcctgaggacgccgattgggatttggaccaggtcgatcaagttcaactgacgctcggcgacaaaatccaacgggagattcgaactcattgggggacgatggccaaagaaccggactttcactattttatccaactggaacaaggtgaggtgttctttcatttacacgtcctgctggaaacgtgttccgtaaagccgatggtactcggaagatatatccgacatattcaacaaaaaattgtgagtaaagtctactgcgccacgagcctacgatggaaggatggatgcgtggtgaccaagaccaaaaatttcgggggcgcgaacaaggtccgggccgagtcgtatattcccgcctacctgatcccgaaacagcaaccggaagtgcagtgggcgtggactaacgtgcccgagtatataaaagcgtgcttgcaccgagaactgcgtgccagtctcgcgcgacttcacttcgaggaggcgggcgtctcgcaatccaaggaaaatctcgcgagaactgcagacggcgctcccgtgatgccgacccgcgtcagcaaacgctacatggagctcgtggattggctcgtggagaaggggatcaccaccgagaaggaatggctgctggaaaacagagaaagctttcggagctttcaggcctcgagcaactcggcgcgtcagatcaagacggccctgcaaggcgccattcaggagatgcttctgaccaagacggcggaggactacctcgtcggaaaggatcccgtctcggacgacgacatccgtcagaaccgcatctacaagattctggaactgaaccactacgacccagcgtacgtggggagtattttggtcgggtggtgccagaagaaatggggcaagcgaaacacgctgtggctgttcggacatgcgaccaccggcaagaccaacatcgcggaggctattgcccatgctgtgccgttctatggatgcgttaactggaccaacgagaactttccgttcaacgactgcgtcgaaaaaatgattatctggtgggaggagggcaaaatgaccgccaaagtggtggaaacagccaaggcgattctgggaggatctcgggtgagagtggaccaaaaatgcaaagcttcggttccgatcgaaccgacgccggtcattattaccagtaacaccaacatgtgttatgtcatcgacgggaacacgaccacgttcgagcataagcagccgttggaggacaggatgtttaagctcgaattgctgactcggttgcctgatgactttggtaaggtgaccaaacaggaggtgcgtcaattcttcaggtggtctcaggatcacctgacccctgtgatcccagaattcctagtgcggaaggcggagtctcgcaaaagacccgccccttccggggaaggctatataagcccgacaaagcggcccgcgctcgcagagcagcagcaggcgtcggagagcgcggacccggttcccaccaggtatcgtatcaaatgctcgaaacattgcggtatggataaaatgttgtttccttgccaaatttgtgaatcgatgaacagagatattaatatttgtgctattcataaaacgaccgactgtaaagagtgtttccccgactacggggataaagatgatgtagaactacccccctgtacagaacacaacgtgtctcgttgttatcaatgtcattcgggcgaattgtatcgcgtgacttcggactctgacgagaaacctgcccccgagagtgatgaaggcaccgagccatcctatgctccctgcacgattcaccacctgatgggcaagagtcacgggttagtcacttgcgcggcgtgtcggttgaaaaatagtacgttgcatgatgacttggatgacggtgatctcgaacaataaatgattgaaatgtagccatgtctctcatttctgatgcgattccagattggttggagcggttggtcaaaaagggagtgaatgctgcagctgatttctaccatttggaaagcggtcctcctcgtcctaaggcaaatcagcaaactcaagaatctcttgaaaaggacgattcgagaggtctcgtgttcccaggctacaattatctaggccctttcaacggtctagataaaggagaacccgtcaacgaggcagacgctgccgccttagaacacgacaaggcttacgacctcgaaatcaaggacgggcacaacccgtactttgagtacaacgaggccgacagacgtttccaggaacgtctcaaagacgatacctcctttggaggcaatttaggtaaagccatcttccaggccaaaaagagggttctcgaaccctttggtctggtggaagactcaaagacggctccgaccggagacaagcggaaaggcgaagacgaacctcgtttgcccgacacttcttcacagactcccaagaaaaacaagaagcctcgcaaggaaagaccttccggcggggcagaagatccgggcgaaggcacctcttccaacgctggagcagcagcacccgcctctagtgtgggatcatctatcatggctgaaggaggtggcggcccagtgggcgatgcaggccagggtgccgatggagtgggcaattcctccggaaattggcattgcgattcccaatggctggaaaacggagtcgtcactcgaaccacccgaacctgggtcttgcccagctacaacaaccacctgtacaaacgaatccaaggacccagcggaggcgacaacaacaacaaattctttggattcagcaccccctggggatactttgactacaatcgattccactgccacttttccccgcgagactggcaacgactcatcaacaacaactggggcatccgtcccaaagcgatgcgctttagactctttaacatccaggttaaagaggtcacggtccaagacttcaacaccaccatcggcaacaacctcaccagtacggtccaggtctttgcggacaaggactaccaactgccgtacgtcctcggatcggctaccgaaggcaccttcccgccgttcccagcggatatctacacgatcccgcagtacgggtactgcacgctaaactacaacaacgaggcggtggatcgttcggccttctactgtctggactactttccctcagacatgctgcggacaggaaataactttgagtttacttacaccttcgaggacgttcctttccatagcatgtttgcccacaaccagacgctagaccggctgatgaatcccctcgtggatcagtacctctgggctttcagctccgtcagccaagcaggctcatctggacgagctcttcattactcgcgggcgactaaaaccaacatggcggctcaatataggaactggttacctgggcctttcttccgtgatcagcaaatctttacgggcgctagcaacatcactaaaaataacgtctttagcgtttgggaaaaaggcaagcaatgggaactcgacaatcggaccaacctaatgcagcccggtcctgcggcagcgaccacctttagcggagaacctgaccgtcaagccatgcaaaacacgctggcttttagcaggaccgtctacgatcaaacgaccgccacgaccgatcgtaaccagatactcatcaccaacgaagacgaaatcagacccaccaactcggtcggtatcgacgcgtggggagcagttcccaccaacaaccagtcgatcgtgacccccggcactcgcgcggccgtcaacaatcaaggggcgcttcccgggatggtgtggcaaaacagagacatttaccctacagggacccatttggccaaaattcccgacactgacaatcacttccatccgtccccgcttattgggcggtttggctgcaagcatccccctccccagattttcattaaaaacacacccgtccctgccaacccttcggaaacgttccagacggccaaagtggcctccttcatcaaccagtactcgaccggacagtgcaccgtcgaaatcttttgggaactcaagaaggaaacctccaagcgctggaaccccgaaatccagttcacctccaactttggcaacgcggccgacatccagtttgccgtctccgacacgggatcctattccgaacctcgtcccatcggtacccgttaccttaccaaacctctgtaaattaaacccttcaataaaccgtttatgcgtaactgtatttccgtctcctgtcgttattcagtcacatgatgcggcattacctcaccggagtgctggccagtttccaagacaggctcgctcgctcactcgggccggggccccaaaggggcccctagcgaccgcttcgcggtcgcggcccgagtgagcgagcgagcctgtcttggaaactggcca

SEQ ID NO: 914 - DNA, 2211 bp, synthetic construct
  source 1..2211: mol_type = other DNA; note = Description of Artificial Sequence: Synthetic polynucleotide
atggctgctgatggttatcttccagattggctcgaggacactctctctgaaggaataagacagtggtggaagctcaaacctggcccaccaccaccaaagcccgcagagcggcataaggacgacagcaggggtcttgtgcttcctgggtacaagtacctcggacccttcaacggactcgacaagggagagccggtcaacgaggcagacgcagcggccctcgagcacgacaaggcctacgaccagcagctcaaggccggtgacaacccctacctcaagtacaaccacgccgacgcggagttccagcagcggcttcagggcgacacatcgtttgggggcaacctcggcagagcagtcttccaggccaaaaagagggttcttgaacctcttggtctggttgagcaagcgggtgagacggctcctggaaagaagagaccgttgattgaatccccccagcagcccgactcctccacgggtatcggcaaaaaaggcaagcagccggctaaaaagagactcaattttggtcagactggcgactcagagtcagtccccgacccacaacctctcggagaacctccagcaacccccgctgctgtgggacctactacaatggcttcaggtggtggcgcaccaatggcagacaataacgaaggcgccgacggagtgggtaatgcctcaggaaattggcattgcgattccacatggctgggcgacagagtcatcaccaccagcacccgcacctgggccttgcccacctacaataaccacctctacaagcaaatctccagtgcttcaacgggggccagcaacgacaaccactacttcggctacagcaccccctgggggtattttgacttcaacagattccactgccacttttcaccacgtgactggcagcgactcatcaacaacaattggggattccggcccaagagactcaacttcaaactcttcaacatccaagtcaaggaggtcacgacgaatgatggcgtcacaaccatcgctaataaccttaccagcacggttcaagtcttctcggactcagactatcagctcccgtacgtgctcgggtcggctcacgagggctgcctcccgccgttcccagcagacgtcttcatggtgccacagtatggatacctcaccctgaacaacgggagtcaggcagtaggacgctcttcattttactgcctggagtactttccttctcagatgctgcgtaccggaaacaactttaccttcagctacacttttgaggacgttcctttccacagcagctacgctcacagccagagtctggaccgtctcatgaatcctctcatcgaccagtacctgtattacctgaacagaactcagaatcagtccggaagtgcccaaaacaaggacttgctgtttagccgggggtctccagctggcatgtctgttcagcccaaaaactggctacctggaccctgttatcggcagcagcgcgtttctaaaacaaaaacagacaacaacaacagcaactttacctggactggtgcttcaaaatataaccttaatgggcgtgaatctataatcaaccctggcactgctatggcctcacacaaagacgacaaagacaagttctttcccatgagcggtgtcatgatttttggaaaggagagcgccggagcttcaaacactgcattggacaatgtcatgatcacagacgaagaggaaatcaaagccactaaccccgtggccaccgaaagatttgggactgtggcagtcaatctccagagcagcagcacagaccctgcgaccggagatgtgcatgttatgggagccttacctggaatggtgtggcaagacagagacgtatacctgcagggtcccatttgggccaaaattcctcacacagatggacactttcacccgtctcctcttatgggcggctttggactcaagaacccgcctcctcagatcctcatcaaaaacacgcctgttcctgcgaatcctccggcggagttttcagctacaaagtttgcttcattcatcacccaatactccacaggacaagtgagtgtggaaattgaatgggagctgcagaaagaaaacagcaagcgctggaatcccgaagtgcagtacacatccaattatgcaaaatctgccaacgttgattttactgtggacaacaatggactttatactgagcctcgccccattggcacccgttacctcacccgtcccctgtaa

SEQ ID NO: 915 - protein, 736 aa, synthetic construct
  source 1..736: note = Description of Artificial Sequence: Synthetic polypeptide
MAADGYLPDWLEDTLSEGIRQWWKLKPGPPPPKPAERHKDDSRGLVLPGYKYLGPFNGLDKGEPVNEADAAALEHDKAYDQQLKAGDNPYLKYNHADAEFQQRLQGDTSFGGNLGRAVFQAKKRVLEPLGLVEQAGETAPGKKRPLIESPQQPDSSTGIGKKGKQPAKKRLNFGQTGDSESVPDPQPLGEPPATPAAVGPTTMASGGGAPMADNNEGADGVGNASGNWHCDSTWLGDRVITTSTRTWALPTYNNHLYKQISSASTGASNDNHYFGYSTPWGYFDFNRFHCHFSPRDWQRLINNNWGFRPKRLNFKLFNIQVKEVTTNDGVTTIANNLTSTVQVFSDSDYQLPYVLGSAHEGCLPPFPADVFMVPQYGYLTLNNGSQAVGRSSFYCLEYFPSQMLRTGNNFTFSYTFEDVPFHSSYAHSQSLDRLMNPLIDQYLYYLNRTQNQSGSAQNKDLLFSRGSPAGMSVQPKNWLPGPCYRQQRVSKTKTDNNNSNFTWTGASKYNLNGRESIINPGTAMASHKDDKDKFFPMSGVMIFGKESAGASNTALDNVMITDEEEIKATNPVATERFGTVAVNLQSSSTDPATGDVHVMGALPGMVWQDRDVYLQGPIWAKIPHTDGHFHPSPLMGGFGLKNPPPQILIKNTPVPANPPAEFSATKFASFITQYSTGQVSVEIEWELQKENSKRWNPEVQYTSNYAKSANVDFTVDNNGLYTEPRPIGTRYLTRPL

SEQ ID NO: 916 - DNA, 2211 bp, synthetic construct
  source 1..2211: mol_type = other DNA; note = Description of Artificial Sequence: Synthetic polynucleotide
atggcttccgatggttatcttccagattggctcgaggacaacctctctgagggcatccgcgagtggtgggacttgaaacctggagccccgaaacccaaagccaaccagcaaaagcaggacgacggccggggtctggtgcttcctggctacaagtacctcggacccttcaacggactcgacaagggggagcccgtcaacgcggcggatgcagcggccctcgagcacgacaaggcctacgaccagcagctcagagcgggtgacaatccgtacctgcggtataaccacgccgacgccgagtttcaggagcgtctgcaagaagatacgtcttttgggggcaacctcgggcgagcagtcttccaggccaagaagagggttctcgaaccttttggtctggttgaggaaggtgctaagacggctcctggaaagaaacgtccggtagagcagtcgccacaagagccagactcctcctcgggcattggcaagacaggccagcagcccgctaaaaagagactcaattttggtcagactggcgactcagagtcagtccccgacccacaacctctcggagaacctccagcaacccccgctgctgtgggacctactacaatggcttcaggcggtggcgcaccaatggcagacaataacgaaggcgccgacggagtgggtaatgcctcaggaaattggcattgcgattccacatggctgggcgacagagtcatcaccaccagcacccgaacatgggccttgcccacctataacaaccacctctacaagcaaatctccagtgcttcaacgggggccagcaacgacaaccactacttcggctacagcaccccctgggggtattttgatttcaacagattccactgccatttctcaccacgtgactggcagcgactcatcaacaacaattggggattccggcccaagagactcaacttcaaactcttcaacatccaagtcaaggaggtcacgacgaatgatggcgtcacaaccatcgctaataaccttaccagcacggttcaagtcttctcggactcggagtaccagcttccgtacgtcctcggctctgcgcaccagggctgcctccctccgttcccggcggacgtgttcatgattccgcagtacggctacctaacgctcaacaatggcagccaggcagtgggacggtcatccttttactgcctggaatatttcccatcgcagatgctgagaacgggcaataactttaccttcagctacaccttcgaggacgtgcctttccacagcagctacgcgcacagccagagcctggaccggctgatgaatcctctcatcgaccagtacctgtattacctgaacagaactcagaatcagtccggaagtgcccaaaacaaggacttgctgtttagccgggggtctccagctggcatgtctgttcagcccaaaaactggctacctggaccctgttaccggcagcagcgcgtttctaaaacaaaaacagacaacaacaacagcaactttacctggactggtgcttcaaaatataaccttaatgggcgtgaatctataatcaaccctggcactgctatggcctcacacaaagacgacaaagacaagttctttcccatgagcggtgtcatgatttttggaaaggagagcgccggagcttcaaacactgcattggacaatgtcatgatcacagacgaagaggaaatcaaagccactaaccccgtggccaccgaaagatttgggactgtggcagtcaatctccagagcagcagcacagaccctgcgaccggagatgtgcatgttatgggagccttacctggaatggtgtggcaagacagagacgtatacctgcagggtcccatttgggccaaaattcctcacacagatggacactttcacccgtctcctcttatgggcggctttggacttaagcacccgcctcctcagatcctcatcaaaaacacgcctgttcctgcgaatcctccggcagagttttcggctacaaagtttgcttcattcatcacccagtattctactggccaagtcagcgtggagattgaatgggagctgcagaaagaaaacagcaaacgctggaatcccgaagtgcagtatacatctaactatgcaaaatctgccaacgttgatttcactgtggacaacaatggactttatactgagcctcgtcccattggcacccgttacctcacccgtcccctgtaa

SEQ ID NO: 917 - protein, 736 aa, synthetic construct
  source 1..736: note = Description of Artificial Sequence: Synthetic polypeptide
MASDGYLPDWLEDNLSEGIREWWDLKPGAPKPKANQQKQDDGRGLVLPGYKYLGPFNGLDKGEPVNAADAAALEHDKAYDQQLRAGDNPYLRYNHADAEFQERLQEDTSFGGNLGRAVFQAKKRVLEPFGLVEEGAKTAPGKKRPVEQSPQEPDSSSGIGKTGQQPAKKRLNFGQTGDSESVPDPQPLGEPPATPAAVGPTTMASGGGAPMADNNEGADGVGNASGNWHCDSTWLGDRVITTSTRTWALPTYNNHLYKQISSASTGASNDNHYFGYSTPWGYFDFNRFHCHFSPRDWQRLINNNWGFRPKRLNFKLFNIQVKEVTTNDGVTTIANNLTSTVQVFSDSEYQLPYVLGSAHQGCLPPFPADVFMIPQYGYLTLNNGSQAVGRSSFYCLEYFPSQMLRTGNNFTFSYTFEDVPFHSSYAHSQSLDRLMNPLIDQYLYYLNRTQNQSGSAQNKDLLFSRGSPAGMSVQPKNWLPGPCYRQQRVSKTKTDNNNSNFTWTGASKYNLNGRESIINPGTAMASHKDDKDKFFPMSGVMIFGKESAGASNTALDNVMITDEEEIKATNPVATERFGTVAVNLQSSSTDPATGDVHVMGALPGMVWQDRDVYLQGPIWAKIPHTDGHFHPSPLMGGFGLKHPPPQILIKNTPVPANPPAEFSATKFASFITQYSTGQVSVEIEWELQKENSKRWNPEVQYTSNYAKSANVDFTVDNNGLYTEPRPIGTRYLTRPL

SEQ ID NO: 918 - DNA, 2211 bp, synthetic construct
  source 1..2211: mol_type = other DNA; note = Description of Artificial Sequence: Synthetic polynucleotide
atggctgctgatggttatcttccagattggctcgaggacactctctctgaaggaataagacagtggtggaagctcaaacctggcccaccaccaccaaagcccgcagagcggcataaggacgacagcaggggtcttgtgcttcctgggtacaagtacctcggacccttcaacggactcgacaagggagagccggtcaacgaggcagacgcagcggccctcgagcacgacaaggcctacgaccagcagctcaaggccggtgacaacccctacctcaagtacaaccacgccgacgcggagttccagcagcggcttcagggcgacacatcgtttgggggcaacctcggcagagcagtcttccaggccaaaaagagggttcttgaacctcttggtctggttgagcaagcgggtgagacggctcctggaaagaagagaccgttgattgaatccccccagcagcccgactcctccacgggtatcggcaaaaaaggcaagcagccggctaaaaagagactcaattttggtcagactggcgactcagagtcagtccccgacccacaacctctcggagaacctccagcaacccccgctgctgtgggacctactacaatggcttcaggtggtggcgcaccaatggcagacaataacgaaggcgccgacggagtgggtaatgcctcaggaaattggcattgcgattccacatggctgggcgacagagtcatcaccaccagcacccgcacctgggccttgcccacctacaataaccacctctacaagcaaatctccagtgcttcaacgggggccagcaacgacaaccactacttcggctacagcaccccctgggggtattttgacttcaacagattccactgccacttttcaccacgtgactggcagcgactcatcaacaacaattggggattccggcccaagagactcaacttcaaactcttcaacatccaagtcaaggaggtcacgacgaatgatggcgtcacaaccatcgctaataaccttaccagcacggttcaagtcttctcggactcagactatcagctcccgtacgtgctcgggtcggctcacgagggctgcctcccgccgttcccagcagacgtcttcatggtgccacagtatggatacctcaccctgaacaacgggagtcaggcagtaggacgctcttcattttactgcctggagtactttccttctcagatgctgcgtaccggaaacaactttaccttcagctacacttttgaggacgttcctttccacagcagctacgctcacagccagagtctggaccgtctcatgaatcctctcatcgaccagtacctgtattacctgaacagaactcagaatcagtccggaagtgcccaaaacaaggacttgctgtttagccgggggtctccaactggcatgtctgttcagcccaaaaactggctacctggaccctgttatcggcagcagcgcgtttctaaaacaaaaacagacaacaacaacagcaactttacctggactggtgcttcaaaatataaccttaatgggcgtgaatctataatcaaccctggcactgctatggcctcacacaaagacgacaaagacaagttctttcccatgagcggtgtcatgatttttggaaaggagagcgccggagcttcaaacactgcattggacaatgtcatgatcacagacgaagaggaaatcaaagccactaaccccgtggccactgaaagatttgggactgtggcagtcaatctccagagcagcagcacagaccctgcgaccggagatgtgcatgccatgggagccttacctggaatggtgtggcaagacagagacgtatacctgcagggtcctatttgggccaaaattcctcacacggatggacactttcacccgtctcctctcatgggcggctttggactcaagaacccgcctcctcagatcctcatcaaaaacacgcctgttcctgcgaatcctccggcggagttttcagctacaaagtttgcttcattcatcacccagtattccacaggacaagtgagcgtggagattgaatgggagctgcagaaagaaaacagcaaacgctggaatcccgaagtgcagtatacatctaactatgcaaaatctgccaacgttgatttcactgtggacaacaatggactttatactgagcctcgccccattggcacccgttacctcacccgtcccctgtaa

SEQ ID NO: 919 - protein, 736 aa, synthetic construct
  source 1..736: note = Description of Artificial Sequence: Synthetic polypeptide
MAADGYLPDWLEDTLSEGIRQWWKLKPGPPPPKPAERHKDDSRGLVLPGYKYLGPFNGLDKGEPVNEADAAALEHDKAYDQQLKAGDNPYLKYNHADAEFQQRLQGDTSFGGNLGRAVFQAKKRVLEPLGLVEQAGETAPGKKRPLIESPQQPDSSTGIGKKGKQPAKKRLNFGQTGDSESVPDPQPLGEPPATPAAVGPTTMASGGGAPMADNNEGADGVGNASGNWHCDSTWLGDRVITTSTRTWALPTYNNHLYKQISSASTGASNDNHYFGYSTPWGYFDFNRFHCHFSPRDWQRLINNNWGFRPKRLNFKLFNIQVKEVTTNDGVTTIANNLTSTVQVFSDSDYQLPYVLGSAHEGCLPPFPADVFMVPQYGYLTLNNGSQAVGRSSFYCLEYFPSQMLRTGNNFTFSYTFEDVPFHSSYAHSQSLDRLMNPLIDQYLYYLNRTQNQSGSAQNKDLLFSRGSPTGMSVQPKNWLPGPCYRQQRVSKTKTDNNNSNFTWTGASKYNLNGRESIINPGTAMASHKDDKDKFFPMSGVMIFGKESAGASNTALDNVMITDEEEIKATNPVATERFGTVAVNLQSSSTDPATGDVHAMGALPGMVWQDRDVYLQGPIWAKIPHTDGHFHPSPLMGGFGLKNPPPQILIKNTPVPANPPAEFSATKFASFITQYSTGQVSVEIEWELQKENSKRWNPEVQYTSNYAKSANVDFTVDNNGLYTEPRPIGTRYLTRPL

SEQ ID NO: 920 - DNA, 2211 bp, synthetic construct
  source 1..2211: mol_type = other DNA; note = Description of Artificial Sequence: Synthetic polynucleotide
atggctgccgatggttatcttccagattggctcgaggacaacctctctgagggcattcgcgagtggtgggcgctgaaacctggagccccgaagcccaaagccaaccagcaaaagcaggacgacggccggggtctggtgcttcctggctacaagtacctcggacccttcaacggactcgacaagggggagcccgtcaacgcggcggatgcagcggccctcgagcacgacaaggcctacgaccagcagctcaaagcgggtgacaatccgtacctgcggtataaccacgccgacgccgagtttcaggagcgtctgcaagaagatacgtcttttgggggcaacctcgggcgagcagtcttccaggccaagaagcgggttctcgaacctctcggtctggttgaggaaggcgctaagacggctcctggaaagaaacgtccggtagagcaatcgccacaagagccagactcctcctcgggcatcggcaagacaggccagcagcccgctaaaaagagactcaattttggtcagactggcgactcagagtcagtccccgacccacaacctctcggagaacctccagcaacccccgctgctgtgggacctactacaatggcttcaggcggtggcgcaccaatggcagacaataacgaaggcgccgacggagtgggtaatgcctcaggaaattggcattgcgattccacatggctgggcgacagagtcatcaccaccagcacccgaacatgggccttgcccacctataacaaccacctctacaagcaaatctccagtgcttcgacgggggccagcaacgacaaccactacttcggctacagcaccccctgggggtattttgactttaacagattccactgccacttttcaccacgtgactggcagcgactcatcaacaacaactggggattccggcccaagagactcagcttcaagctcttcaacatccaggtcaaggaggtcacgacgaatgatggcgtcacaaccatcgctaataaccttaccagcacggttcaagtcttctcggactcggagtaccagcttccgtacgtcctcggctctgcgcaccagggctgcctccctccgttcccggcggacgtgttcatgattccgcaatacggctacctgacgctcaacaatggcagccaagccgtgggacgttcatccttttactgcctggaatatttcccttctcagatgctgagaacgggcaacaactttaccttcagctacacctttgaggaagtgcctttccacagcagctacgcgcacagccagagcctggaccggctgatgaatcctctcatcgatcaatacctgtattacctgaacagaactcaaaatcagtccggaagtgcccaaaacaaggacttgctgtttagccgtgggtctccagctggcatgtctgttcagcccaaaaactggctacctggaccctgttatcggcagcagcgcgtttctaaaacaaaaacagacaacaacaacagcaattttacctggactggtgcttcaaaatataacctcaatgggcgtgaatccatcatcaaccctggcactgctatggcctcacataaagacgacgaagacaagttctttcccatgagcggtgtcatgatttttggaaaagagagcgccggagcttcaaacactgcattggacaatgtcatgattacagacgaagaggaaattaaagccactaaccctgtggccaccgaaagatttgggaccgtggcagtcaatttccagagcagcagcacagaccctgcgaccggagatgtgcatgctatgggagcattacctggcatggtgtggcaagatagagacgtgtacctgcagggtcccatttgggccaaaattcctcacacagatggacactttcacccgtctcctcttatgggcggctttggactcaagaacccgcctcctcagatcctcatcaaaaacacgcctgttcctgcgaatcctccggcggagttttcagctacaaagtttgcttcattcatcacccaatactccacaggacaagtgagcgtggagattgaatgggagctgcagaaagaaaacagcaaacgctggaatcccgaagtgcagtatacatctaactatgcaaaatctgccaacattgatttcactgtggacaacaatggactttatactgagcctcgccccattggcacccgttacctcacccgtccccagtaa

SEQ ID NO: 921 - protein, 736 aa, synthetic construct
  source 1..736: note = Description of Artificial Sequence: Synthetic polypeptide
MAADGYLPDWLEDNLSEGIREWWALKPGAPKPKANQQKQDDGRGLVLPGYKYLGPFNGLDKGEPVNAADAAALEHDKAYDQQLKAGDNPYLRYNHADAEFQERLQEDTSFGGNLGRAVFQAKKRVLEPLGLVEEGAKTAPGKKRPVEQSPQEPDSSSGIGKTGQQPAKKRLNFGQTGDSESVPDPQPLGEPPATPAAVGPTTMASGGGAPMADNNEGADGVGNASGNWHCDSTWLGDRVITTSTRTWALPTYNNHLYKQISSASTGASNDNHYFGYSTPWGYFDFNRFHCHFSPRDWQRLINNNWGFRPKRLSFKLFNIQVKEVTTNDGVTTIANNLTSTVQVFSDSEYQLPYVLGSAHQGCLPPFPADVFMIPQYGYLTLNNGSQAVGRSSFYCLEYFPSQMLRTGNNFTFSYTFEEVPFHSSYAHSQSLDRLMNPLIDQYLYYLNRTQNQSGSAQNKDLLFSRGSPAGMSVQPKNWLPGPCYRQQRVSKTKTDNNNSNFTWTGASKYNLNGRESIINPGTAMASHKDDEDKFFPMSGVMIFGKESAGASNTALDNVMITDEEEIKATNPVATERFGTVAVNFQSSSTDPATGDVHAMGALPGMVWQDRDVYLQGPIWAKIPHTDGHFHPSPLMGGFGLKNPPPQILIKNTPVPANPPAEFSATKFASFITQYSTGQVSVEIEWELQKENSKRWNPEVQYTSNYAKSANIDFTVDNNGLYTEPRPIGTRYLTRPQ

SEQ ID NO: 922 - DNA, 2211 bp, synthetic construct
  source 1..2211: mol_type = other DNA; note = Description of Artificial Sequence: Synthetic polynucleotide
atggctgccgatggttatcttccagattggctcgaggacaacctctctgagggcattcgcgagtggtgggacttgaaacctggagccccgaaacccaaagccaaccagcaaaagcaggacgacggccggggtctggtgcttcctggctacaagtacctcggacccttcaacggactcgacaagggggagcccgtcaacgcggcggatgcagcggccctcgagcacgacaaggcctacgaccagcagctcaaagcgggtgacaatccgtaccttcggtataaccacgccgacgccgagtttcaggagcgtctgcaagaagatacgtcttttgggggcaacctcgggcgagcagtcttccaggccaaaaagagggttctcgaacctctcggtctggttgaggaagcggctaagacggctcctggaaagaaacgtccggtagagcagtcgccacaagagccagactcctcctcgggcattggcaagacaggccagcagcccgctaaaaagagactcaattttggtcagactggcgactcagagtcagtccccgacccacaacctctcggagaacctcccgcagccccctcaggtgtgggatctcttacaatggcttcaggtggtggcgcaccaatggcagacaataacgaaggcgccgacggagtgggtaatgcctcaggaaattggcattgcgattccacatggctgggcgacagagtcatcaccaccagcacccgcacctgggccttgcccacctacaataaccacctctacaagcaaatctccagtgcttcaacgggggccagcaacgacaaccactacttcggctacagcaccccctgggggtattttgacttcaacagattccactgccacttttcaccacgtgactggcaaagactcatcaacaacaattggggattccggcccaagagactcaacttcaagctcttcaacatccaagtcaaggaggtcacgacgaatgatggcgtcacgaccatcgctaataaccttaccagcacggttcaagtcttctcggactcggagtaccagttgccgtacgtcctcggctctgcgcaccagggctgcctccctccgttcccggcggacgtgttcatgattccgcagtacggctacctaacgctcaacaatggcagccaggcagtgggacggtcatccttttactgcctggaatatttcccatcgcagatgctgagaacgggcaacaactttaccttcagctacacctttgaggaagtgcctttccacagcagctacgcgcacagccagagcctggaccggctgatgaatcctctcatcgaccagtacctgtattacctgaacagaactcaaaatcagtccggaagtgcccaaaacaaggacttgctgtttagccgtgggtctccagctggcatgtctgttcagcccaaaaactggctacctggaccctgttaccggcagcagtgcgtttctaaaacaaaaacagacaacaacaacagcaactttacctggactggtgcttcaaaatataaccttaatgggcgtgaatctataatcaaccctggcactgctatggcctcacacaaagacgacaaagacaagttctttcccatgagcggtgtcatgatttttggaaaggagagcgccggagcttcaaacactgcattggacaatgtcatgatcacagacgaagaggaaatcaaagccactaaccccgtggccaccgaaagatttgggactgtggcagtcaatctccagagcagcagcacagaccctgcgaccggagatgtgcatgttatgggagccttacctggaatggtgtggcaagacagagacgtatacctgcagggtcctatttgggccaaaattcctcacacagatggacactttcacccgtctcctcttatgggcggctttggactcaagaacccgcctcctcagatcctcatcaaaaacacgcctgttcctgcgaatcctccggcggagttttcagctacaaagtttgcttcattcatcacccaatactccacaggacaagtgagcgtggagattgaatgggagctgcagaaagaaaacagcaagcgctggaatcccgaagtgcagtacacatccaattatgcaaaatctgccaacgttgatttcactgtggacaacaatggactttatactgagcctcgccccattggcacccgttacctcacccgtcccctgtaa

SEQ ID NO: 923 - protein, 736 aa, synthetic construct
  source 1..736: note = Description of Artificial Sequence: Synthetic polypeptide
MAADGYLPDWLEDNLSEGIREWWDLKPGAPKPKANQQKQDDGRGLVLPGYKYLGPFNGLDKGEPVNAADAAALEHDKAYDQQLKAGDNPYLRYNHADAEFQERLQEDTSFGGNLGRAVFQAKKRVLEPLGLVEEAAKTAPGKKRPVEQSPQEPDSSSGIGKTGQQPAKKRLNFGQTGDSESVPDPQPLGEPPAAPSGVGSLTMASGGGAPMADNNEGADGVGNASGNWHCDSTWLGDRVITTSTRTWALPTYNNHLYKQISSASTGASNDNHYFGYSTPWGYFDFNRFHCHFSPRDWQRLINNNWGFRPKRLNFKLFNIQVKEVTTNDGVTTIANNLTSTVQVFSDSEYQLPYVLGSAHQGCLPPFPADVFMIPQYGYLTLNNGSQAVGRSSFYCLEYFPSQMLRTGNNFTFSYTFEEVPFHSSYAHSQSLDRLMNPLIDQYLYYLNRTQNQSGSAQNKDLLFSRGSPAGMSVQPKNWLPGPCYRQQCVSKTKTDNNNSNFTWTGASKYNLNGRESIINPGTAMASHKDDKDKFFPMSGVMIFGKESAGASNTALDNVMITDEEEIKATNPVATERFGTVAVNLQSSSTDPATGDVHVMGALPGMVWQDRDVYLQGPIWAKIPHTDGHFHPSPLMGGFGLKNPPPQILIKNTPVPANPPAEFSATKFASFITQYSTGQVSVEIEWELQKENSKRWNPEVQYTSNYAKSANVDFTVDNNGLYTEPRPIGTRYLTRPL

SEQ ID NO: 924 - DNA, 2211 bp, synthetic construct
  source 1..2211: mol_type = other DNA; note = Description of Artificial Sequence: Synthetic polynucleotide
atggctgccgatggttatcttccagattggctcgaggacaacctctctgagggcattcgcgaatggtgggacttgaaacctggagccccgaaacccaaagtcaaccagcaaaagcaggacaacgctcggggtcttgtgcttccgggttacaaatacctcggacccttcaacggactcgacaagggggagcccgtcaacgcggcggacgcagcggccctcgagcacgacaaggcctacgaccagcagctcaaagcgggtgacaatccgtaccttcggtataaccacgccgacgccgagtttcaggagcgtctgcaagaagatacgtcttttgggggcaaccttggacgagcagtcttccaggccaagaagagggttctcgaaccttttggtctggttgaggaaggtgctaagacggctcctggaaagaaacgtccggtagagcagtcgccacaagagccagactcctcctcgggcattggcaagacaggccagcagcccgctaaaaagagactcaattttggtcagactggcgactcagagtcagtccccgacccacaacctctcggagaacctccagcaacccccgctgctgtgggacctactacaatggcttcaggcggtggcgcaccaatggcagacaataacgaaggcgccgacggagtgggtaatgcctcaggaaattggcattgcgattccacatggctgggcgacagagtcatcaccaccagcacccgcacctgggccttgcccacctacaataaccacctctacaagcaaatctccagtgcttcaacgggggccagcaacgacaaccactacttcggctacagcaccccctgggggtattttgacttcaacagattccactgccacttttcaccacgtgactggcaaagactcatcaacaacaattggggattccggcccaagagactcaacttcaagctcttcaacatccaagtcaaggaggtcacgacgaatgatggcgtcacgaccatcgctaataaccttaccagcacggttcaagtcttctcggactcggagtaccagttgccgtacgtcctcggctctgcgcaccagggctgcctccctccgttcccggcggacgtgttcatgattccgcaatacggctacctgacgctcaacaatggcagccaggcagtgggacggtcatccttttactgcctggaatatttcccatcgcagatgctgagaacgggcaataactttaccttcagctacacttttgaggacgttcctttccacagcagctacgctcacagccagagcctggaccggctgatgaatcctctcatcgaccagtacctgtattacctgaacagaactcagaatcagtccggaagtgcccaaaacaaggacttgctgtttagccgtgggtctccaactggcatgtctgttcagcccaaaaactggctacctggaccctgttatcggcagcagcgcgtttctaaaacaaaaacagacaacaacaacagcaactttacctggactggtgcttcaaaatataaccttaatgggcgtgaatctataatcaaccctggcactgctatggcctcacacaaagacgacgaagacaagttctttcccatgagcggtgtcatgatttttggaaaggagagcgccggagcttcaaacactgcattggacaatgtcatgatcacagacgaagaggaaatcaaagccactaaccccgtggccactgaaagatttgggactgtggcagtcaatctccagagcagcagcacagaccctgcgaccggagatgtgcatgccatgggagccttacctggaatggtgtggcaagacagagacgtatacctgcagggtcctatttgggccaaaattcctcacacggatggacactttcacccgtctcctctcatgggcggctttggacttaagcacccgcctcctcagatcctcatcaaaaacacgcctgttcctgcgaatcctccggcagagttttcggctacaaagtttgcttcattcatcacccagtattccacaggacaagtgagcgtggagattgaatgggagctgcagaaagaaaacagcaaacgctggaatcccgaagtgcagtatacatctaactatgcaaaatctgccaacgttgatttcactgtggacaacaatggactttatactgagcctcgccccattggcacccgttacctcacccgtcccctgtaa

SEQ ID NO: 925 - protein, 736 aa, synthetic construct
  source 1..736: note = Description of Artificial Sequence: Synthetic polypeptide
MAADGYLPDWLEDNLSEGIREWWDLKPGAPKPKVNQQKQDNARGLVLPGYKYLGPFNGLDKGEPVNAADAAALEHDKAYDQQLKAGDNPYLRYNHADAEFQERLQEDTSFGGNLGRAVFQAKKRVLEPFGLVEEGAKTAPGKKRPVEQSPQEPDSSSGIGKTGQQPAKKRLNFGQTGDSESVPDPQPLGEPPATPAAVGPTTMASGGGAPMADNNEGADGVGNASGNWHCDSTWLGDRVITTSTRTWALPTYNNHLYKQISSASTGASNDNHYFGYSTPWGYFDFNRFHCHFSPRDWQRLINNNWGFRPKRLNFKLFNIQVKEVTTNDGVTTIANNLTSTVQVFSDSEYQLPYVLGSAHQGCLPPFPADVFMIPQYGYLTLNNGSQAVGRSSFYCLEYFPSQMLRTGNNFTFSYTFEDVPFHSSYAHSQSLDRLMNPLIDQYLYYLNRTQNQSGSAQNKDLLFSRGSPTGMSVQPKNWLPGPCYRQQRVSKTKTDNNNSNFTWTGASKYNLNGRESIINPGTAMASHKDDEDKFFPMSGVMIFGKESAGASNTALDNVMITDEEEIKATNPVATERFGTVAVNLQSSSTDPATGDVHAMGALPGMVWQDRDVYLQGPIWAKIPHTDGHFHPSPLMGGFGLKHPPPQILIKNTPVPANPPAEFSATKFASFITQYSTGQVSVEIEWELQKENSKRWNPEVQYTSNYAKSANVDFTVDNNGLYTEPRPIGTRYLTRPL

SEQ ID NO: 926 - DNA, 2208 bp, synthetic construct
  source 1..2208: mol_type = other DNA; note = Description of Artificial Sequence: Synthetic polynucleotide
  misc_difference 955: note = modified_base - a, c, t, or g
  misc_difference 971: note = modified_base - a, c, t, or g
  misc_difference 972: note = modified_base - a, c, t, or g
  misc_difference 981: note = modified_base - a, c, t, or g
  misc_difference 986: note = modified_base - a, c, t, or g
  misc_difference 1235: note = modified_base - a, c, t, or g
  misc_difference 1694: note = modified_base - a, c, t, or g
  misc_difference 1695: note = modified_base - a, c, t, or g
  misc_difference 1696: note = modified_base - a, c, t, or g
  misc_difference 1698: note = modified_base - a, c, t, or g
  misc_difference 1763: note = modified_base - a, c, t, or g
  misc_difference 1764: note = modified_base - a, c, t, or g
  misc_difference 1765: note = modified_base - a, c, t, or g
  misc_difference 1778: note = modified_base - a, c, t, or g
  misc_difference 2204: note = modified_base - a, c, t, or g
atggctgccgatggttatcttccagattggctcgaggacaacctctctgagggcattcgcgaatggtgggacttgaaacctggagccccgaaacccaaagtcaaccagcaaaagcaggacaacgctcggggtcttgtgcttccgggttacaaatacctcggacccttcaacggactcgacaagggggagcccgtcaacgcggcggacgcagcggccctcgagcacgacaaggcctacgaccagcagctcaaagcgggtgacaatccgtaccttcggtataaccacgccgacgccgagtttcaggagcgtctgcaagaagatacgtcttttgggggcaaccttggacgagcagtcttccaggccaagaagagggttctcgaaccttttggtctggttgaggaaggtgctaagacggctcctggaaagaaacgtccggtagagcagtcgccacaagagccagactcctcctcgggcattggcaagacaggccagcagcccgctaaaaagagactcaattttggtcagactggcgactcagagtcagtccccgacccacaacctctcggagaacctccagcaacccccgctgctgtgggacctactacaatggcttcaggcggtggcgcaccaatggcagacaataacgaaggcgccgacggagtgggtaatgcctcaggaaattggcattgcgattccacatggctgggcgacagagtcatcaccaccagcacccgaacatgggccttgcccacctataacaaccacctctacaagcaaatctccagtgcttcaacgggggccagcaacgacaaccactacttcggctacagcaccccctgggggtattttgatttcaacagattccactgccacttttcaccacgtgactggcagcgactcatcaataacaattggggattccggcccaagagactcaacttcaaactcttcaacntccaagtcaaggaggnnacgacgaangatgncgtcacaaccatcgctaataaccttaccagcacggttcaagtcttctcggactcggagtaccagcttccgtacgtcctcggctctgcgcaccagggctgcctccctccgttcccggcggacgtgttcatgattccgcaatacggctacctgacgctcaacaatggcagccaggcagtgggacggtcatccttttactgcctggaatatttcccatcgcagatgctgagaacgggcaataactttacctncagctacacttttgaggacgttcctttccacagcagctacgctcacagccagagcctggaccggctgatgaatcctctcatcgaccagtacctgtattacctgaacagaactcagaatcagtccggaagtgcccaaaacaaggacttgctgtttagccgtgggtctccaactggcatgtctgttcagcccaaaaactggctacctggaccctgttatcggcagcagcgcgtttctaaaacaaaaacagacaacaacaacagcaactttacctggactggtgcttcaaaatataaccttaatgggcgtgaatctataatcaaccctggcactgctatggcctcacacaaagacgacgaagacaagttctttcccatgagcggtgtcatgatttttggaaaggagagcgccggagcttcaaacactgcattggacaatgtcatgatcacagacgaagagannncnaagccactaaccccgtggccactgaaagatttgggactgtggcagtcaatctccaagcagcacannnaccctgcgaccgnagatgtgcatgccatgggagccttacctggaatggtgtggcaagacagagacgtatacctgcagggtcctatttgggccaaaattcctcacacggatggacactttcacccgtctcctctcatgggcggctttggacttaagcacccgcctcctcagatcctcatcaaaaacacgcctgttcctgcgaatcctccggcagagttttcggctacaaagtttgcttcattcatcacccagtattccacaggacaagtgagcgtggagattgaatgggagctgcagaaagaaaacagcaaacgctggaatcccgaagtgcagtatacatctaactatgcaaaatctgccaacgttgatttcactgtggacaacaatggactttatactgagcctcgccccattggcacccgttacctcacccgtccccngtaa

SEQ ID NO: 927 - protein, 723 aa, synthetic construct
  source 1..723: note = Description of Artificial Sequence: Synthetic polypeptide
MAADGYLPDWLEDNLSEGIREWWDLKPGAPKPKVNQQKQDNARGLVLPGYKYLGPFNGLDKGEPVNAADAAALEHDKAYDQQLKAGDNPYLRYNHADAEFQERLQEDTSFGGNLGRAVFQAKKRVLEPFGLVEEGAKTAPGKKRPVEQSPQEPDSSSGIGKTGQQPAKKRLNFGQTGDSESVPDPQPLGEPPATPAAVGPTTMASGGGAPMADNNEGADGVGNASGNWHCDSTWLGDRVITTSTRTWALPTYNNHLYKQISSASTGASNDNHYFGYSTPWGYFDFNRFHCHFSPRDWQRLINNNWGFRPKRLNFKLFNQVKETTDVTTIANNLTSTVQVFSDSEYQLPYVLGSAHQGCLPPFPADVFMIPQYGYLTLNNGSQAVGRSSFYCLEYFPSQMLRTGNNFTSYTFEDVPFHSSYAHSQSLDRLMNPLIDQYLYYLNRTQNQSGSAQNKDLLFSRGSPTGMSVQPKNWLPGPCYRQQRVSKTKTDNNNSNFTWTGASKYNLNGRESIINPGTAMASHKDDEDKFFPMSGVMIFGKESAGASNTALDNVMITDEEATNPVATERFGTVAVNLQSSPATDVHAMGALPGMVWQDRDVYLQGPIWAKIPHTDGHFHPSPLMGGFGLKHPPPQILIKNTPVPANPPAEFSATKFASFITQYSTGQVSVEIEWELQKENSKRWNPEVQYTSNYAKSANVDFTVDNNGLYTEPRPIGTRYLTRP

SEQ ID NO: 928 - DNA, 2208 bp, synthetic construct
  source 1..2208: mol_type = other DNA; note = Description of Artificial Sequence: Synthetic polynucleotide
atggctgccgatggttatcttccagattggctcgaggacactctctctgaaggaataagacagtggtggaagctcaaacctggcccaccaccaccaaagcccgcagagcggcataaggacgacagcaggggtcttgtgcttcctgggtacaagtacctcggacccttcaacggactcgacaagggagagccggtcaacgaggcagacgccgcggccctcgagcacgacaaagcctatgaccggcagctcgacagcggagacaacccgtacctcaagtacaaccacgccgacgcggagtttcaggagcgccttaaagaagatacgtcttttgggggcaacctcggacgagcagtcttccaggcgaaaaagagggttcttgaacctctgggcctggttgaggaacctgttaagacggctccgggaaaaaagaggccggtagagcactctcctgtggagccagactcctcctcgggaaccggaaaggcgggtcagcagcctgcaagaaaaagattgaattttggtcagactggagacgcagactcagtacctgacccccagcctctcggacagccaccagcagccccctctggtctgggaactaatacgatggctacaggcagtggcgcaccaatggcagacaataacgagggcgccgacggagtgggtaattcctcgggaaattggcattgcgattccacatggatgggcgacagagtcatcaccaccagcacccgaacctgggccctgcccacctacaacaaccacctctacaaacaaatttccagccaatcaggagcctcgaacgacaatcactactttggctacagcaccccttgggggtattttgacttcaacagattccactgccacttttcaccacgtgactggcaaagactcatcaacaacaactggggattccgacccaagagactcaagttcaagctctttaacattcaagtcaaagaggtcacgcagaatgacggtacgacgacgattgccaataaccttaccagcacggttcaggtgtttactgactcggagtaccagctcccgtacgtcctcggctcggcgcatcaaggatgcctcccgccgttcccagcagacgtcttcatggtgccacagtatggatacctcaccctgaacaacgggagtcaggcagtaggacgctcttcattttactgcctggagtactttccttctcagatgctgcgtaccggtaacaactttaccttcagctacacttttgaggacgttcctttccacagcagctacgctcacagccagagtctggaccgtctcatgaatcctctcatcgaccagtacctgtattacttgagcagaacagacgctccaagtggaaccaccacgcagtcaaggcttcagttttctcaggccggagcgagtgacattcgggaccagtctaggaactggcttcctggaccctgttaccgccagcagcgagtatcaaagacatctgcggataacaacaacagtgaatactcgtggactggagctaccaagtaccacctcaatggcagagactctctggtgaatccgggcccggccatggcaagccacaaggacgatgaagaaaagttttttcctcagagcggggttctcatctttgggaagcaaggctcagagaaaacaagtgtggacattgaaaaggtcatgattacagacgaagaggaaatcaggacaaccaatcccgtggctacggagcagtatggttctgtatctaccaacctccagagaggcaacagacaagcagctaccgcagatgtcaacacacaaggcgttcttccaggcatggtctggcaggacagagatgtgtaccttcaggggcccatctgggcaaagattccacacacggacggacattttcacccctctcccctcatgggtggattcggacttaaacaccctcctccacagattctcatcaagaacaccccggtacctgcgaatccttcgaccaccttcagtgcggcaaagtttgcttccttcatcacacagtactccacgggacaggtcagcgtggagatcgagtgggagctgcagaaggaaaacagcaaacgctggaatcccgaagttcagtacacttccaactacaacaagtctgttaatgtggactttactgtggacactaatggcgtgtattcagagcctcgccccattggcaccagatacctgactcgtaatctgtaa

SEQ ID NO: 929 - protein, 735 aa, synthetic construct
  source 1..735: note = Description of Artificial Sequence: Synthetic polypeptide
MAADGYLPDWLEDTLSEGIRQWWKLKPGPPPPKPAERHKDDSRGLVLPGYKYLGPFNGLDKGEPVNEADAAALEHDKAYDRQLDSGDNPYLKYNHADAEFQERLKEDTSFGGNLGRAVFQAKKRVLEPLGLVEEPVKTAPGKKRPVEHSPVEPDSSSGTGKAGQQPARKRLNFGQTGDADSVPDPQPLGQPPAAPSGLGTNTMATGSGAPMADNNEGADGVGNSSGNWHCDSTWMGDRVITTSTRTWALPTYNNHLYKQISSQSGASNDNHYFGYSTPWGYFDFNRFHCHFSPRDWQRLINNNWGFRPKRLKFKLFNIQVKEVTQNDGTTTIANNLTSTVQVFTDSEYQLPYVLGSAHQGCLPPFPADVFMVPQYGYLTLNNGSQAVGRSSFYCLEYFPSQMLRTGNNFTFSYTFEDVPFHSSYAHSQSLDRLMNPLIDQYLYYLSRTDAPSGTTTQSRLQFSQAGASDIRDQSRNWLPGPCYRQQRVSKTSADNNNSEYSWTGATKYHLNGRDSLVNPGPAMASHKDDEEKFFPQSGVLIFGKQGSEKTSVDIEKVMITDEEEIRTTNPVATEQYGSVSTNLQRGNRQAATADVNTQGVLPGMVWQDRDVYLQGPIWAKIPHTDGHFHPSPLMGGFGLKHPPPQILIKNTPVPANPSTTFSAAKFASFITQYSTGQVSVEIEWELQKENSKRWNPEVQYTSNYNKSVNVDFTVDTNGVYSEPRPIGTRYLTRNL

SEQ ID NO: 930 - DNA, 2208 bp, synthetic construct
  source 1..2208: mol_type = other DNA; note = Description of Artificial Sequence: Synthetic polynucleotide
atggctgccgatggttatcttccagattggctcgaggacactctctctgaaggaataagacagtggtggaagctcaaacctggcccaccaccaccaaagcccgcagagcggcataaggacgacagcaggggtcttgtgcttcctgggtacaagtacctcggacccttcaacggactcgacaagggagagccggtcaacgaggcagacgccgcggccctcgagcacgacaaagcctatgaccggcagctcgacagcggagacaacccgtacctcaagtacaaccacgccgacgcggagtttcaggagcgccttaaagaagatacgtcttttgggggcaacctcggacgagcagtcttccaggcgaaaaagagggttcttgaacctctgggcctggttgaggaacctgttaagacggctccgggaaaaaagaggccggtagagcactctcctgtggagccagactcctcctcgggaaccggaaaggcgggccagcagcctgcaagaaaaagattgaattttggtcagactggagacgcaaactcagtacctgacccccagcctctcggacagccaccagcagccccctctggtctgggaactaatacgatggctacaggcagtggcgcaccaatggcagacaataacgagggcgccgacggagtgggtaattcctcgggaaattggcattgcgattccacatggatgggcgacagagtcatcaccaccagcacccgaacctgggccctgcccacctacaacaaccacctctacaaacaaatttccagccaatcaggagcctcgaacgacaatcactactttggctacagcaccccttgggggtattttgacttcaacagattccactgccacttttcaccacgtgactggcaaagactcatcaacaacaactggggattccgacccaagagactcaagttcaagctctttaacattcaagtcaaagaggtcacgcagaatgacggtacgacgacgattgccaataaccttaccagcacggttcaggtgtttactgactcggagtaccagctcccgtacgtcctcggctcggcgcatcaaggatgcctcccgccgttcccagcagacgtcttcatggtgccacagtatggatacctcaccctgaacaacgggagtcgggcagtaggacgctcttcattttactgcctggagtactttccttctcagatgctgcgtaccggtaacaactttaccttcagctacacttttgaggacgttcctttccacagcagctacgctcacagccagagtctggaccgtctcatgaatcctctcatcgaccagtacctgtattacttgagcagaacagacactccaagtggaaccaccacgcagtcaaggcttcagttttctcaggccggagcgagtgacattcgggaccagtctaggaactggcttcctggaccctgttaccgccagcagcgagtatcaaagacatctgcggataacaacaacagtgaatactcgtggactggagctaccaagtaccacctcaatggcagagactctctggtgaatccgggcccggccatggcaagccacaaggacgatgaagaaaagttttttcctcagagcggggttctcatctttgggaagcaaggctcagagaaaacaagtgtggacattgaaaaggtcatgattacagacgaagaggaaatcaggacgaccaatcccgtggctacggagcagtatggttctgtatctaccaacctccagagaggcaacagacaagcagctaccgcagatgtcaacacacaaggcgttcttccaggcatggtctggcaggacagagatgtgtaccttcaggggcccatctgggcaaagattccacacacggacggacattttcacccctctcccctcatgggtggattcggacttaaacaccctcctccacagattctcatcaagaacaccccggtacctgcgaatccttcgaccaccttcagtgcggcaaagtttgcttccttcatcacacagtactccacgggacaggtcagcgtggagatcgagtgggagctgcagaaggaaaacagcaaacgctggaatcccgaagttcagtacacttccaactacaacaagtctgttaatgtggactttactgtggacactaatggcgtgtatacagagcctcgccccattggcaccagatacctgactcgtaatctgtaa

SEQ ID NO: 931 - protein, 735 aa, synthetic construct
  source 1..735: note = Description of Artificial Sequence: Synthetic polypeptide
MAADGYLPDWLEDTLSEGIRQWWKLKPGPPPPKPAERHKDDSRGLVLPGYKYLGPFNGLDKGEPVNEADAAALEHDKAYDRQLDSGDNPYLKYNHADAEFQERLKEDTSFGGNLGRAVFQAKKRVLEPLGLVEEPVKTAPGKKRPVEHSPVEPDSSSGTGKAGQQPARKRLNFGQTGDANSVPDPQPLGQPPAAPSGLGTNTMATGSGAPMADNNEGADGVGNSSGNWHCDSTWMGDRVITTSTRTWALPTYNNHLYKQISSQSGASNDNHYFGYSTPWGYFDFNRFHCHFSPRDWQRLINNNWGFRPKRLKFKLFNIQVKEVTQNDGTTTIANNLTSTVQVFTDSEYQLPYVLGSAHQGCLPPFPADVFMVPQYGYLTLNNGSRAVGRSSFYCLEYFPSQMLRTGNNFTFSYTFEDVPFHSSYAHSQSLDRLMNPLIDQYLYYLSRTDTPSGTTTQSRLQFSQAGASDIRDQSRNWLPGPCYRQQRVSKTSADNNNSEYSWTGATKYHLNGRDSLVNPGPAMASHKDDEEKFFPQSGVLIFGKQGSEKTSVDIEKVMITDEEEIRTTNPVATEQYGSVSTNLQRGNRQAATADVNTQGVLPGMVWQDRDVYLQGPIWAKIPHTDGHFHPSPLMGGFGLKHPPPQILIKNTPVPANPSTTFSAAKFASFITQYSTGQVSVEIEWELQKENSKRWNPEVQYTSNYNKSVNVDFTVDTNGVYTEPRPIGTRYLTRNL

SEQ ID NO: 932 - DNA, 2211 bp, synthetic construct
  source 1..2211: mol_type = other DNA; note = Description of Artificial Sequence: Synthetic polynucleotide
atggctgccgatggttatcttccagattggctcgaggacactctctctgaaggaataagacagtggtggaagctcaaacctggcccaccaccaccaaagcccgcagagcggcataaggacgacagcaggggtcttgtgcttcctgggtacaagtacctcggacccttcaacggactcgacaagggagagccggtcaacgaggcagacgccgcggccctcgagcacgacaaggcctacgaccagcagctcaaagcgggtgacaatccgtacctgcggtataaccacgccgacgccgagtttcaggagcgtctgcaagaagatacgtcttttgggggcaacctcgggcgagcagtcttccaggccaagaagcgggttctcgaacctctcggtctggttgaggaaggcgctaagacggctcctggaaagaaacgtccggtagagcagtcgccacaagagccagactcctcctcgggcatcggcaagacaggccagcagcccgctaaaaagagactcaattttggtcagactggcgactcagagtcagtccccgacccacaacctctcggagaacctccagcaacccccgctgctgtgggacctactacaatggcttcaggcggtggcgcaccaatggcagacaataacgaaggcgccgacggagtgggtaatgcctcaggaaattggcattgcgattccacatggctgggcgacagagtcatcaccaccagcacccgaacatgggccttgcccacctataacaaccacctctacaagcaaatctccagtgcttcgacgggggccagcaacgacaaccactacttcggctacagcaccccctgggggtattttgactttaacagattccactgccacttttcaccacgtgactggcagcgactcatcaacaataactggggattccggcccaagagactcagcttcaagctcttcaacatccaggtcaaggaggtcacgacgaatgatggcgtcacaaccatcgctaataaccttaccagcacggttcaagtcttctcggactcggagtaccagcttccgtacgtcctcggctctgcgcaccagggctgcctccctccgttcccggcggacgtgttcatgattccgcaatacggctacctgacgctcaacaatggcagccaagccgtgggacgttcatccttttactgcctggaatatttcccttctcagatgctgagaacgggcaacaactttaccttcagctacacctttgaggaagtgcctttccacagcagctacgcgcacagccagagcctggaccggctgatgaatcctctcatcgatcaatacctgtattacctgaacagaactcaaaatcagtccggaagtgcccaaaacaaggacttgctgtttagccgtgggtctccagctggcatgtctgttcagcccaaaaactggctacctggaccctgttatcggcagcagcgcgtttctaaaacaaaaacagacaacaacaacagcaattttacctggactggtgcttcaaaatataacctcaatgggcgtgaatccatcatcaaccctggcactgctatggcctcacacaaagacgacgaagacaagttctttcccatgagcggtgtcatgatttttggaaaagagagcgccggagcttcaaacactgcattggacaatgtcatgattacggacgaagaggaaattaaagccactaaccctgtggccaccgaaagatttgggaccgtggcagtcaatttccagagcagcagcacagaccctgcgaccggagatgtgcatgctatgggagcattacctggcatggtgtggcaagatagagacgtgtacctgcagggtcccatttgggccaaaattcctcacacagatggacactttcacccgtctcctcttatgggcggctttggactcaagaacccgcctcctcagatcctcatcaaaaacacgcctgttcctgcgaatcctccggcggagttttcagctacaaagtttgcttcattcatcactcaatactccacaggacaagtgagcgtggaaattgaatgggagctgcagaaagaaaacagcaaacgctggaatcccgaagtgcagtatacatctaactatgcaaaatctgccaacgttgatttcactgtggacaacaatggactttatactgagcctcgccccattggcacccgttacctcacccgtcccctgtaa

SEQ ID NO: 933 - protein, 736 aa, synthetic construct
  source 1..736: note = Description of Artificial Sequence: Synthetic polypeptide
MAADGYLPDWLEDTLSEGIRQWWKLKPGPPPPKPAERHKDDSRGLVLPGYKYLGPFNGLDKGEPVNEADAAALEHDKAYDQQLKAGDNPYLRYNHADAEFQERLQEDTSFGGNLGRAVFQAKKRVLEPLGLVEEGAKTAPGKKRPVEQSPQEPDSSSGIGKTGQQPAKKRLNFGQTGDSESVPDPQPLGEPPATPAAVGPTTMASGGGAPMADNNEGADGVGNASGNWHCDSTWLGDRVITTSTRTWALPTYNNHLYKQISSASTGASNDNHYFGYSTPWGYFDFNRFHCHFSPRDWQRLINNNWGFRPKRLSFKLFNIQVKEVTTNDGVTTIANNLTSTVQVFSDSEYQLPYVLGSAHQGCLPPFPADVFMIPQYGYLTLNNGSQAVGRSSFYCLEYFPSQMLRTGNNFTFSYTFEEVPFHSSYAHSQSLDRLMNPLIDQYLYYLNRTQNQSGSAQNKDLLFSRGSPAGMSVQPKNWLPGPCYRQQRVSKTKTDNNNSNFTWTGASKYNLNGRESIINPGTAMASHKDDEDKFFPMSGVMIFGKESAGASNTALDNVMITDEEEIKATNPVATERFGTVAVNFQSSSTDPATGDVHAMGALPGMVWQDRDVYLQGPIWAKIPHTDGHFHPSPLMGGFGLKNPPPQILIKNTPVPANPPAEFSATKFASFITQYSTGQVSVEIEWELQKENSKRWNPEVQYTSNYAKSANVDFTVDNNGLYTEPRPIGTRYLTRPL

SEQ ID NO: 934 - protein, 735 aa, synthetic construct
  source 1..735: note = Description of Artificial Sequence: Synthetic polypeptide
MAADGYLPDWLEDTLSEGIRQWWKLKPGPPPPKPAERHKDDSRGLVLPGYKYLGPFNGLDKGEPVNEADAAALEHDKAYDRQLDSGDNPYLKYNHADAEFQERLKEDTSFGGNLGRAVFQAKKRVLEPLGLVEEPVKTAPGKKRPVEHSPVEPDSSSGTGKAGQQPARKRLNFGQTGDADSVPDPQPLGQPPAAPSGLGTNTMATGSGAPMADNNEGADGVGNSSGNWHCDSTWMGDRVITTSTRTWALPTYNNHLYKQISSQSGASNDNHYFGYSTPWGYFDFNRFHCHFSPRDWQRLINNNWGFRPKRLKFKLFNIQVKEVTQNDGTTTIANNLTSTVQVFTDSEYQLPYVLGSAHQGCLPPFPADVFMVPQYGYLTLNNGSQAVGRSSFYCLEYFPSQMLRTGNNFTFSYTFEDVPFHSSYAHSQSLDRLMNPLIDQYLYYLSRTDTPSGTTTQSRLQFSQAGASDIRNQSRNWLPGPCYRQQRVSKTSADNNNSEYSWTGATKYHLNGRDSLVNPGPAMASHKDDEEKFFPQSGVLIFGKQGSEKTSVDIEKVMITDEEEIRTTNPVATEQYGSVSTNLQRGNRQAATADVNTQGVLPGMVWQDRDVYLQGPIWAKIPHTDGHFHPSPLMGGFGLKHPPPQILIKNTPVPANPSTTFSAAKFASFITQYSTGQVSVEIEWELQKENSKRWNPEVQYTSNYNKSVNVDFTVDTNGVYSEPRPIGTRYLTRNQ

SEQ ID NO: 935 - DNA, 2208 bp, synthetic construct
  source 1..2208: mol_type = other DNA; note = Description of Artificial Sequence: Synthetic polynucleotide
atggctgccgatggttatcttccagattggctcgaggacactctctctgaaggaataagacagtggtggaagctcaaacctggcccaccaccaccaaagcccgcagagcggcataaggacgacagcaggggtcttgtgcttcctgggtacaagtacctcggacccttcaacggactcgacaagggagagccggtcaacgaggcagacgccgcggccctcgagcacgacaaagcctatgaccggcagctcgacagcggagacaacccgtacctcaagtacaaccacgccgacgcggagtttcaggaacgccttaaagaagatacgtcttttgggggcaacctcggacgagcagtcttccaggcgaaaaagagggttcttgaacctctgggcctggttgaggaacctgttaagacggctccgggaaaaaagaggccggtagagcactctcctgtggagccagactcctcctcgggaaccggaaaggcgggccagcagcctgcaagaaaaagattgaattttggtcagactggagacgcagactcagtacctgacccccagcctctcggacagccaccagcagccccctctggtctgggaactaatacgatggctacaggcagtggcgcaccaatggcagacaataacgagggcgccgacggagtgggtaattcctcgggaaattggcattgcgattccacatggatgggcgacagagtcatcaccaccagcacccgaacctgggccctgcccacctacaacaaccacctctacaaacaaatttccagccaatcaggagcctcgaacgacaatcactactttggctacagcaccccttgggggtattttgacttcaacagattccactgccacttttcaccacgtgactggcaaagactcatcaacaacaactggggattccgacccaagagactcaagttcaagctctttaacattcaagtcaaagaggtcacgcagaatgacggtacgacgacgattgccaataaccttaccagcacggttcaggtgtttactgactcggagtaccagctcccgtacgtcctcggctcggcgcatcaaggatgcctcccgccgttcccagcagacgtcttcatggtgccacagtatggatacctcaccctgaacaacgggagtcaggcagtaggacgctcttcattttactgcctggagtactttccttctcagatgctgcgtaccggtaacaactttaccttcagctacacttttgaggacgttcctttccacagcagctacgctcacagccagagtctggaccgtctcatgaatcctctcatcgaccagtacctgtattacttgagcagaacagacactccaagtggaaccaccacgcagtcaaggcttcagttttctcaggccggagcgagtgacattcggaaccagtctaggaactggcttcctggaccctgttaccgccagcagcgagtatcaaagacatctgcggataacaacaacagtgaatactcgtggactggagctaccaagtaccacctcaatggcagagactctctggtgaatccgggcccggccatggcaagccacaaggacgatgaagaaaagttttttcctcagagcggggttctcatctttgggaagcaaggctcagagaaaacaagtgtggacattgaaaaggtcatgattacagacgaagaggaaatcaggacaaccaatcccgtggctacggagcagtatggttctgtatctaccaacctccagagaggcaacagacaagcagctaccgcagatgtcaacacacaaggcgttcttccaggcatggtctggcaggacagagatgtgtaccttcaggggcccatctgggcaaagattccacacacggacggacattttcacccctctcccctcatgggtggattcggacttaaacaccctcctccacagattctcatcaagaacaccccggtacctgcgaatccttcgaccaccttcagtgcggcaaagtttgcttccttcatcacacagtactccacgggacaggtcagcgtggagatcgagtgggagctgcagaaggaaaacagcaaacgctggaatcccgaagttcagtacacttccaactacaacaagtctgttaatgtggactttactgtggacactaatggcgtgtattcagagcctcgccccattggcaccagatacctgactcgtaatcagtaa

SEQ ID NO: 936 - DNA, 2208 bp, synthetic construct
  source 1..2208: mol_type = other DNA; note = Description of Artificial Sequence: Synthetic polynucleotide
atggctgccgatggttatcttccagattggctcgaggacactctctctgaaggaataagacagtggtggaagctcaaacctggcccaccaccaccaaagcccgcagagcggcataaggacgacagcaggggtcttgtgcttcctgggtacaagtacctcggacccttcaacggactcgacaagggagagccggtcaacgaggcagacgccgcggccctcgagcacgacaaagcctatgaccggcagctcgacagcggagacaacccgtacctcaagtacaaccacgccgacgcggagtttcaggagcgccttaaagaagatacgtcttttgggggcaacctcggacgagcagtcttccaggcgaaaaagagggttcttgaacctctgggcctggttgaggaacctgttaagacggctccgggaaaaaagaggccggtagagcactctcctgtggagccagactcctcctcgggaaccggaaaggcgggccagcagcctgcaagaaaaagattgaattttggtcagactggagacgcagactcagtacctgatccccagcctctcggacagccaccagcagccccctctggtctgggaactaatacgatggctacaggcagtggcgcaccaatggcagacaataacgagggcgccgacggagtgggtaattcctcgggaaattggcattgcgattccacatggatgggcgacagagtcatcaccaccagcacccgaacctgggccctgcccacctacaacaaccacctctacaaacaaatttccagccaatcaggagcctcgaacgacaatcactactttggctacagcaccccttgggggtattttgacttcaacagattccactgccacttttcaccacgtgactggcaaagactcatcaacaacaactggggattccgacccaagagactcaagttcaagctctttaacattcaagtcaaagaggtcacgcagaatgacggtacgacgacgattgccaataaccttaccagcacggttcaggtgtttactgactcggagtaccagctcccgtatgtcctcggctcggcgcatcaaggatgcctcccgccgttcccagcagacgtcttcatggtgccacagtatggatacctcaccctgaacaacgggagtcaggcagtaggacgctcttcattttactgcctggagtactttccttctcagatgctgcgtaccggtaacaactttaccttcagctacacttttgaggacgttcctttccacagcagctacgctcacagccagagtctggaccgtctcatgaatcctctcatcgaccagtacctgtattacttgagcagaacagacactccaagtggaaccaccacgcagtcaaggcttcagttttctcaggccggagcgagtgacattcgggaccagtctaggaactggcttcctggaccctgttaccgccagcagcgagtatcaaagacatctgcggataacaacaacagtgaatactcgtggactggagctaccaagtaccacctcaatggcagagactctctggtgaatccgggcccggccatggcaagccacaaggacgatgaagaaaagttttttcctcagagcggggttctcatctttgggaagcaaggctcagagaaaacaagtgtggacattgaaaaggtcatgattacagacgaagaggaaatcaggacaaccaatcccgtggctacggagcagtatggttctgtatctaccaacctccagagaggcaacagacaagcagctaccgcagatgtcaacacacaaggcgttcttccaggcatggtctggcaggacagagatgtgtaccttcaggggcccatctgggcaaagattccacacacggacggacattttcacccctctcccctcatgggtggattcggacttaaacaccctcctccacagattctcatcaagaacaccccggtacctgcgaatccttcgaccaccttcagtgcggcaaagtttgcttccttcatcacacagtactccacgggacaggtcagcgtggagatcgagtgggagctgcagaaggaaaacagcaaacgctggaatcccgaagttcagtacacttccaactacaacaagtctgttaatgtggactttactgtggacactaatggcgtgtattcagagcctcgccccattggcaccagatacctgactcgtaatctgtaa

SEQ ID NO: 937 - protein, 735 aa, synthetic construct
  source 1..735: note = Description of Artificial Sequence: Synthetic polypeptide
MAADGYLPDWLEDTLSEGIRQWWKLKPGPPPPKPAERHKDDSRGLVLPGYKYLGPFNGLDKGEPVNEADAAALEHDKAYDRQLDSGDNPYLKYNHADAEFQERLKEDTSFGGNLGRAVFQAKKRVLEPLGLVEEPVKTAPGKKRPVEHSPVEPDSSSGTGKAGQQPARKRLNFGQTGDADSVPDPQPLGQPPAAPSGLGTNTMATGSGAPMADNNEGADGVGNSSGNWHCDSTWMGDRVITTSTRTWALPTYNNHLYKQISSQSGASNDNHYFGYSTPWGYFDFNRFHCHFSPRDWQRLINNNWGFRPKRLKFKLFNIQVKEVTQNDGTTTIANNLTSTVQVFTDSEYQLPYVLGSAHQGCLPPFPADVFMVPQYGYLTLNNGSQAVGRSSFYCLEYFPSQMLRTGNNFTFSYTFEDVPFHSSYAHSQSLDRLMNPLIDQYLYYLSRTDTPSGTTTQSRLQFSQAGASDIRDQSRNWLPGPCYRQQRVSKTSADNNNSEYSWTGATKYHLNGRDSLVNPGPAMASHKDDEEKFFPQSGVLIFGKQGSEKTSVDIEKVMITDEEEIRTTNPVATEQYGSVSTNLQRGNRQAATADVNTQGVLPGMVWQDRDVYLQGPIWAKIPHTDGHFHPSPLMGGFGLKHPPPQILIKNTPVPANPSTTFSAAKFASFITQYSTGQVSVEIEWELQKENSKRWNPEVQYTSNYNKSVNVDFTVDTNGVYSEPRPIGTRYLTRNL

SEQ ID NO: 938 - DNA, 2601 bp, synthetic construct
  source 1..2601: mol_type = other DNA; note = Description of Artificial Sequence: Synthetic polynucleotide
ccatcgacgtcagacgcggaagcttcgatcaactacgcggacaggtaccaaaacaaatgttctcgtcacgtgggcatgaatctgatgctgtttccctgcagacaatgcgagagactgaatcagaattcaaatatctgcttcactcacggtgtcaaagactgtttagagtgctttcccgtgtcagaatctcaacccgtttctgtcgtcaaaaaggcgtatcagaaactgtgctacattcatcacatcatgggaaaggtgccagacgcttgcactgcttgcgacctggtcaatgtggacttggatgactgtgtttctgaacaataaatgacttaaaccaggtatgactgccgatggttatcttccagattggctcgaggacaaccttagtgaaggaattcgcgagtggtgggctttgaaacctggagcccctcaacccaaggcaaatcaacaacatcaagacaacgctcgaggtcttgtgcttccgggttacaaataccttggacccggcaacggactcgacaagggggagccggtcaacgcagcagacgcggcggccctcgagcacgacaaggcctacgaccagcagctcaaggccggagacaacccgtacctcaagtacaaccacgccgacgccgagttccaggagcggctcaaagaagatacgtcttttgggggcaacctcgggcgagcagtcttccaggccaaaaagaggcttcttgaacctcttggtctggttgaggaagcggctaagacggctcctggaaagaagaggcctgtagagcagtctcctcaggaaccggactcctccgcgggtattggcaaatcgggtgcacagcccgctaaaaagagactcaatttcggtcagactggcgacacagagtcagtcccagaccctcaaccaatcggagaacctcccgcagccccctcaggtgtgggatctcttacaatggcttcaggtggtggcgcaccagtggcagacaataacgaaggtgccgatggagtgggtagttcctcgggaaattggcattgcgattcccaatggctgggggacagagtcatcaccaccagcacccgaacctgggccctgcccacctacaacaatcacctctacaagcaaatctccaacagcacatctggaggatcttcaaatgacaacgcctacttcggctacagcaccccctgggggtattttgacttcaacagattccactgccacttctcaccacgtgactggcagcgactcatcaacaacaactggggattccggcctaagcaactcaacttcaagctcttcaacattcaggtcaaagaggttacggacaacaatggagtcaagaccatcgccaataaccttaccagcacggtccaggtcttcacggactcagactatcagctcccgtacgtgctcgggtcggctcacgagggctgcctcccgccgttcccagcggacgttttcatgattcctcagtacgggtatctgacgcttaatgatggaagccaggccgtgggtcgttcgtccttttactgcctggaatatttcccgtcgcaaatgctaagaacgggtaacaacttccagttcagctacgagtttgagaacgtacctttccatagcagctacgctcacagccaaagcctggaccgactaatgaatccactcatcgaccaatacttgtactatctctcaaagactattaacggttctggacagaatcaacaaacgctaaaattcagtgtggccggacccagcaacatggctgtccagggaagaaactacatacctggacccagctaccgacaacaacgtgtctcaaccactgtgactcaaaacaacaacagcgaatttgcttggcctggagcttcttcttgggctctcaatggacgtaatagcttgatgaatcctggacctgctatggccagccacaaagaaggagaggaccgtttctttcctttgtctggatctttaatttttggcaaacaaggaactggaagagacaacgtggatgcggacaaagtcatgataaccaacgaagaagaaattaaaactactaacccggtagcaacggagtcctatggacaagtggccacaaaccaccagagtgcccaagcacaggcgcagaccggctgggttcaaaaccaaggaatacttccgggtatggtttggcaggacagagatgtgtacctgcaaggacccatttgggccaaaattcctcacacggacggcaactttcacccttctccgctgatgggagggtttggaatgaagcacccgcctcctcagatcctcatcaaaaacacacctgtacctgcggatcctccaacggccttcaacaaggacaagctgaactctttcatcacccagtattctactggccaagtcagcgtggagatcgagtgggagctgcagaaggaaaacagcaagcgctggaacccggagatccagtacacttccaactattacaagtctaataatgttgaatttgctgttaatactgaaggtgtatatagtgaaccccgccccattggcaccagatacctgactcgtaatctgtaattgcttgttaatcaataaaccgtttaattcgtttcagttgaactgcggcc

SEQ ID NO: 939 - DNA, 2601 bp, synthetic construct
  source 1..2601: mol_type = other DNA; note = Description of Artificial Sequence: Synthetic polynucleotide
ccatcgacgtcagacgcggaagcttcgatcaactacgcggacaggtaccaaaacaaatgttctcgtcacgtgggcatgaatctgatgctgtttccctgcagacaatgcgagagactgaatcagaattcaaatatctgcttcactcacggtgtcaaagactgtttagagtgctttcccgtgtcagaatctcaacccgtttctgtcgtcaaaaaggcgtatcagaaactgtgctacattcatcacatcatgggaaaggtgccagacgcttgcactgcttgcgacctggtcaatgtggacttggatgactgtgtttctgaacaataaatgacttaaaccaggtatggctgccgatggttatcttccagattggctcgaggacaaccttagtgaaggaattcgcgagtggtgggctttgaaacctggagcccctcaacccaaggcaaatcaacaacatcaagacaacgctcgaggtcttgtgcttccgggttacaaataccttggacccggcaacggactcgacaagggggagccggtcaacgcagcagacgcggcggccctcgagcacgacaaggcctacgaccagcagctcaaggccggagacaacccgtacctcaagtacaaccacgccgacgccgagttccaggagcggctcaaagaagatacgtcttttgggggcaacctcgggcgagcagtcttccaggccaaaaagaggcttcttgaacctcttggtctggttgaggaagcggctaagacggctcctggaaagaagaggcctgtagagcagtctcctcaggaaccggactcctccgcgggtattggcaaatcgggtgcacagcccgctaaaaagagactcaatttcggtcagactggcgacacagagtcagtcccagaccctcaaccaatcggagaacctcccgcagccccctcaggtgtgggatctcttacaatggcttcaggtggtggcgcaccagtggcagacaataacgaaggtgccgatggagtgggtagttcctcgggaaattggcattgcgattcccaatggctgggggacagagtcatcaccaccagcacccgaacctgggccctgcccacctacaacaatcacctctacaagcaaatctccaacagcacatctggaggatcttcaaatgacaacgcctacttcggctacagcaccccctgggggtattttgacttcaacagattccactgccacttctcaccacgtgactggcagcgactcatcaacaacaactggggattccggcctaagcgactcaacttcaagctcttcaacattcaggtcaaagaggttacggacaacaatggagtcaagaccatcgccaataaccttaccagcacggtccaggtcttcacggactcagactatcagctcccgtacgtgctcgggtcggctcacgagggctgcctcccgccgttcccagcggacgttttcatgattcctcagtacgggtatctgacgcttaatgatggaagccaggccgtgggtcgttcgtccttttactgcctggaatatttcccgtcgcaaatgctaagaacgggtaacaacttccagttcagctacgagtttgagaacgtacctttccatagcagctacgctcacagccaaagcctggaccgactaatgaatccactcatcgaccaatacttgtactatctctcaaagactattaacggttctggacagaatcaacaaacgctaaaattcagtgtggccggacccagcaacatggctgtccagggaagaaactacatacctggacccagctaccgacaacaacgtgtctcaaccactgtgactcaaaacaacaacagcgaatttgcttggcctggggcttcttcttgggctctcaatggacgtaatagcttgatgaatcctggacctgctatggccagccacaaagaaggagaggaccgtttctttcctttgtctggatctttaatttttggcaaacaaggaactggaagagacaacgtggatgcggacaaagtcatgataaccaacgaagaagaaattaaaactactaacccggtagcaacggagtcctatggacaagtggccacaaaccaccagagtgcccaagcacaggcgcagaccggctgggttcaaaaccaaggaatacttccgggtatggtttggcaggacagagatgtgtacctgcaaggacccatttgggccaaaattcctcacacgggcggcaactttcacccttctccgctgatgggagggtttggaatgaagcacccgcctcctcagatcctcatcaaaaacacacctgtacctgcggatcctccaacggccttcaacaaggacaagctgaactctttcatcacccagtattctactggccaagtcagcgtggagatcgagtgggagctgcagaaggaaaacagcaagcgctggaacccggagatccagtacacttccaactattacaagtctaataatgttgaatttgctgttaatactggaggtgtatatagtgaaccccgccccattggcaccagatacctgactcgtaatctgtaattgcttgttaatcaataaaccgtttaattcgtttcagttgaactgcggcc

SEQ ID NO: 940 - DNA, 2601 bp, synthetic construct
  source 1..2601: mol_type = other DNA; note = Description of Artificial Sequence: Synthetic polynucleotide
ccatcgacgtcagacgcggaagcttcgatcaactacgcggacaggtaccaaaacaaatgttctcgtcacgtgggcatgaatctgatgctgtttccctgcagacaatgcgagagactgaatcagaattcaaatatctgcttcactcacggtgtcaaagactgtttagagtgctttcccgtgtcagaatctcaacccgtttctgtcgtcaaaaaggcgtatcagaaactgtgctacattcatcacatcatgggaaaggtgccagacgcttgcactgcttgcgacctggtcaatgtggactcggatgactgtgtttctgaacaataaatgacttaaaccaggtatggctgccgatggttatcttccagattggctcgaggacaaccttagtgaaggaattcgcgagtggtgggctttgaaacctggagcccctcaacccaaggcaaatcaacaacatcaagacaacgctcgaggtcttgtgcttccgggttacaaataccttggacccggcaacggactcgacaagggggagccggtcaacgcagcagacgcggcggccctcgagcacgacaaggcctacgaccagcagctcaaggccggagacaacccgtacctcaagtacaaccacgccgacgccgagttccaggagcggctcaaagaagatacgtcttttgggggcaacctcgggcgagcagtcttccaggccaaaaagaggcttcttgaacctcttggtctggttgaggaagcggctaagacggctcctggaaagaagaggcctgtagagcagtctcctcaggaaccggactcctccgcgggtattgacaaatcgggtgcacagcccgctaaaaagagactcaatttcggtcagactggcgacacagagtcagtcccagaccctcaaccaatcggagaacctcccgcagccccctcaggtgtgggatctcttacaatggcttcaggtggtggcgcaccagtggcagacaataacgaaggtgccgatggagtgggtagttcctcgggaaattggcattgcgattcccaatggctgggggacagagtcatcaccaccagcacccgaacctgggccctgcccacctacaacaatcacctctacaagcaaatctccaacagcacatctggaggatcttcaaatgacaacgcctacttcggctacagcaccccctgggggtattttgacttcaacagattccactgccacttctcaccacgtgactggcagcgactcatcaacaacaactggggattccggcctaagcgactcaacttcaagctcttcaacattcaggtcaaagaggttacggacaacaatggagtcaagaccatcgccaataaccttaccagcacggtccaggtcttcacggactcggactatcagctcccgtacgtgctcgggtcggctcacgagggctgcctcccgccgttcccagcggacgttttcatgattcctcagtacgggtatctgacgcttaatgatggaagccaggccgtgggtcgttcgtccttttactgcctggaatatttcccgtcgcaaatgctaagaacgggtaacaacttccagttcagctacgagtttgagaacgtacctttccatagcagctacgctcacagccaaagcctggaccgactaatgaatccactcatcgaccaatacttgtactatctctcaaagactattaacggttctggacagaatcaacaaacgctaaaattcagtgtggccggacccagcaacatggctgtccagggaagaaactacatacctggacccagctaccgacaacaacgtgtctcaaccactgtgactcaaaacaacaacagcgaatttgcttggcctggagcttcttcttgggctctcaatggacgtaatagcttgatgaatcctggacctgctatggccagccacaaagaaggagaggaccgtttctttcctttgtctggatctttaatttttggcaaacaaggaactggaagagacaacgtggatgcggacaaagtcatgataaccaacgaagaagaaattaaaactactaacccggtagcaacggagtcctatggacaagtggccacaaaccaccagagtgcccaagcacaggcgcagaccggctgggttcaaaaccaaggaatacttccgggtatggtttggcaggacagagatgtgtacctgcaaggacccatttgggccaaaattcctcacacggacggcaactttcacccttctccgctgatgggagggtttggaatgaagcacccgcctcctcagatcctcatcaaaaacacacctgtacctgcggatcctccaacggccttcaacaaggacaagctgaactctttcatcacccagtattctactggccaagtcagcgtggagatcgagtgggagctgcagaaggaaaacagcaagcgctggaacccggagatccagtacacttccaactattacaagtctaataatgttgaatttgctgttaatactgaaggtgtatatagtgaaccccgccccattggcaccagatacctgactcgtaatctgtaattgcttgttaatcaataaaccgtttaattcgtttcagttgaactgcggcc

SEQ ID NO: 941 - DNA, 2601 bp, synthetic construct
  source 1..2601: mol_type = other DNA; note = Description of Artificial Sequence: Synthetic polynucleotide
ccatcgacgtcagacgcggaagcttcgatcaactacgcggacaggtaccaaaacaaatgttctcgtcacgtgggcatgaatctgatgctgtttccctgcagacaatgcgagagactgaatcagaattcaaatatctgcttcactcacggtgtcaaagactgtttagagtgctttcccgtgtcagaatctcaacccgtttctgtcgtcaaaaaggcgtatcagaaactgtgctacattcatcacatcatgggaaaggtgccagacgcttgcactgcttgcgacctggtcaatgtggacttggatgactgtgtttctgaacaataaatgacttaaaccaggtatggctgccgatggttatcttccagattggctcgaggacaaccttagtgaaggaattcgcgagtggtgggctttgaaacctggagcccctcaacccaaggcaaatcaacaacatcaagacaacgctcgaggtcttgtgcttccgggttacaaataccttggacccggcaacggactcgacaagggggagccggtcaacgcagcagacgcggcggccctcgagcacgacaaggcctacgaccagcagctcaaggccggagacaacccgtacctcaagtacaaccacgccgacgccgagttccaggagcggctcaaagaagatacgtcttttgggggcaacctcgggcgagcagtcctccaggccaaaaagaggcttcttgaacctcttggtctggttgaggaagcggctaagacggctcctggaaagaagaggcctgtagagcagtctcctcaggaaccggactcctccgcgggtattggcaaatcgggtgcacagcccgctaaaaagagactcaatttcggtcagactggcgacacagagtcagtcccagaccctcaaccaatcggagaacctcccgcagccccctcaggtgtgggatctcttacaatggcttcaggtggtggcgcaccagtggcagacaataacgaaggtgccgatggagtgggtagttcctcgggaaattggcattgcgattcccaatggctgggggacagagtcatcaccaccagcacccgaacctgggccctgcccacctacaacaatcacctctacaagcaaatctccaacagcacatctggaggatcttcaaatgacaacgcctacttcggctacagcaccccctgggggtattttgacttcaacagattccactgccacttctcaccacgtgactggcagcgactcatcaacaacaactggggattccggcctaagcgactcaacttcaagctcttcaacattcaggtcaaagaggttacggacaacaatggagtcaagaccatcgccaataaccttaccagcacggtccaggtcttcacggactcagactatcagctcccgtacgtgctcgggtcggctcacgagggctgcctcccgccgttcccagcggacgttttcatgattcctcagtacgggtatctgacgcttaatgatggaagccaggccgtgggtcgttcgtccttttactgcctggaatatttcccgtcgcaaatgctaagaacgggtaacaacttccagttcagctacgagtttgagaacgtacctttccatagcagctacgctcacagccaaagcctggaccgactaatgaatccactcatcgaccaatacttgtactatctctcaaagactattaacggttctggacagaatcaacaaacgctaaaattcagtgtggccggatccagcaacatggctgtccagggaagaaactacatacctggacccagctaccgacaacaacgtgtctcaaccactgtgactcaaaacaacaacagcgaatttgcttggcctggagcttcttcttgggctctcaatggacgtaatagcttgatgaatcctggacctgctatggccagccacaaagaaggagaggaccgtttctttcctttgtctggatctttaatttttggcaaacaaggaactggaagagacaacgtggatgcggacaaagtcatgataaccaacgaagaagaaattaaaactactaacccggtagcaacggagtcctatggacaagtggccacaaaccaccagagtgcccaagcacaggcgcagaccggctgggttcaaaaccaaggaatacttccaggtatggtttggcaggacagagatgtgtacctgcaaggacccatttgggccaaaattcctcacacggacggcaactttcacccttctccgctgatgggagggtttggaatgaagcacccgcctcctcagatcctcatcaaaaacacacctgtacctgcggatcctccaacggccttcaacaaggacaagctgaactctttcatcacccagtattctactggccaagtcagcgtggagatcgagtgggagctgcagaaggaaaacagcaagcgctggaacccggagatccagtacacttccaactattacaagtctaataatgttgaatttgctgttaatactgaaggtgtatatagtgaaccccgccccattggcaccagatacctgactcgtaatctgtaattgcttgttaatcaataaaccgtttaattcgtttcagttgaactgcggcc

SEQ ID NO: 942 - DNA, 2601 bp, synthetic construct
  source 1..2601: mol_type = other DNA; note = Description of Artificial Sequence: Synthetic polynucleotide
ccatcgacgtcagacgcggaagcttcgatcaactacgcggacaggtaccaaaacaaatgttctcgtcacgtgggcatgaatctgatgctgtttccctgcagacaatgcgagagactgaatcagaattcaaatatctgcttcactcacggtgtcaaagactgtttagagtgctttcccgtgtcagaatctcaacccgtttctgtcgtcaaaaaggcgtatcagaaactgtgctacattcatcacatcatgggaaaggtgccagacgcttgcactgcttgcgacctggtcaatgtggacttggatgactgtgtttctgaacaataaatgacttaaaccaggtatggctgccgatggttatcttccagattggctcgaggacaaccttagtgaaggaattcgcgagtggtgggctttgaaacctggagcccctcaacccaaggcaaatcaacaacatcaagacaacgctcgaggtcttgtgcttccgggttacaaataccttggacccggcaacggactcgacaagggggagccggtcaacgcagcagacgcggcggccctcgagcacgacagggcctacgaccagcagctcaaggccggagacaacccgtacctcaagtacaaccacgccgacgccgagttccaggagcggctcaaagaagatacgtcttttgggggcaacctcgggcgagcagtcttccaggccaaaaagaggcttcttgaacctcttggtctggttgaggaagcggctaagacggctcctggaaagaagaggcctgtagagcagtctcctcaggaaccggactcctccgcgggtattggcaaatcgggtgcacagcccgctaaaaagagactcaatttcggtcagactggcgacacagagtcagtcccagaccctcaaccaatcggagaacctcccgcagccccctcaggtgtgggatctcttacaatggcttcaggtggtggcgcaccagtggcagacaataacgaaggtgccgatggagtgggtagttcctcgggaaattggcattgcgattcccaatggctgggggacagagtcatcaccaccagcacccgaacctgggccctgcccacctacaacaatcacctctacaagcaaatctccaacagcacatctggaggatcttcaaatgacaacgcctacttcggctacagcaccccctgggggtattttgacttcaacagattccactgccacttctcaccacgtgactggcagcgactcatcaacaacaactggggattccggcctaagcgactcaacttcaagctcttcaacattcaggtcaaagaggttacggacaacaatggagtcaagaccatcgccaataaccttaccagcacggtccaggtcttcacggactcagactatcagctcccgtacgtgctcgggtcggctcacgagggctgcctcccgccgttcccagcggacgttttcatgattcctcagtacgggtatctgacgcttaatgatggaagccaggccgtgggtcgttcgtccttttactgcctggaatatttcccgtcgcaaatgctaagaacgggtaacaacttccagttcagctacgagtttgagaacgtacctttccatagcagctacgctcacagccaaagcctggaccgactaatgaatccactcatcgaccaatacttgtactatctctcaaagactattaacggttctggacagaatcaacaaacgctaaaattcagtgtggccggacctagcaacatggctgtccagggaagaaactacatacctggacccagctaccgacaacaacgtgtctcaaccactgtgactcaaaacaacaacagcgaatttgcttggcctggagcttcttcttgggctctcaatggacgtaatagcttgatgaatcctggacctgctatggccagccacaaagaaggagaggaccgtttctttcctttgtctggatctttaatttttggcaaacaaggaactggaagagacaacgtggatgcggacaaagtcatgataaccaacgaagaagaaattaaaactactaacccggtagcaacggagtcctatggacaagtggccacaaaccaccagagtgcccaagcacaggcgcagaccggctgggttcaaaaccaaggaatacttccgggtatggtttggcaggacagagatgtgtacctgcaaggacccatttgggccaaaattcctcacacggacggcaactttcacccttctccgctgatgggagggtttggaatgaagcacccgcctcctcagatcctcatcaaaaacacacctgtacctgcggatcctccaacggccttcaacaaggacaagctgaactctttcatcacccagtattctactggccaagtcagcgtggagatcgagtgggagctgcagaagaaaaacagcaagcgctggaacccggagatccagtacacttccaactattacaagtctaataatgttgaatttgctgttaacactgaaggtgtatatagtgaaccccgccccattggcaccagatacctgactcgtaatctgtaattgcttgttaatcaataaaccgtttaattcgtttcagttgaactgcggcc

SEQ ID NO: 943 - DNA, 2601 bp, synthetic construct
  source 1..2601: mol_type = other DNA; note = Description of Artificial Sequence: Synthetic polynucleotide
ccatcgacgtcagacgcggaagcttcgatcaactacgcggacaggtaccaaaacaaatgttctcgtcacgtgggcatgaatctgatgctgtttccctgcagacaatgcgagagactgaatcagaattcaaatatctgcttcactcacggtgtcaaagactgtttagagtgctttcccgtgtcagaatctcaacccgtttctgtcgtcaaaaaggcgtatcagaaactgtgctacattcatcacatcatgggaaaggtgccagacgcttgcactgcttgcgacctggtcaatgtggacttggatgactgtgtttctgaacaataaatgacttaaaccaggtatggctgccgatggttatcttccagattggctcgaggacaaccttagtgaaggaattcgcgagtggtgggctttgaaacctggagcccctcaacccaaggcaaatcaacaacatcaagacaacgctcgaggtcttgtgcttccgggttacaaataccttggacccggcaacggactcgacaagggggagccggtcaacgcagcagacgcggcggccctcgagcacgacaaggcctacgaccagcagctcaaggccggagacaacccgtacctcaagtacaaccacgccgacgccgagttccaggagcggctcaaagaagatacgtcttttgggggcaacctcgggcgagcagtcttccaggccaaaaagaggcttcttgaacctcttggtctggttgaggaagcggctaagacggctcctggaaagaagaggcctgtagagcagtctcctcaggaaccggactcctccgcgggtattggcaaatcgggtgcacagcccgctaaaaagagactcaatttcggtcagactggcgacacagagtcagtcccagaccctcaaccaatcggagaacctcccgcagccccctcaggtgtgggatctcttacaatggcttcaggtggtggcgcaccagtggcagacaataacgaaggtgccgatggagtgggtagttcctcgggaaattggcattgcgattcccaatggctgggggacagagtcatcaccaccagcacccgaacctgggccctgcccacctacaacaatcacctctacaagcaaatctccaacagcacatctggaggatcttcaaatgacaacgcctacttcggctacagcaccccctgggggtattttgacttcaacagattccactgccacttctcaccacgtgactggcagcgactcatcaacaacaactggggattccggcctaagcgactcaacttcaagctcttcaacattcaggtcaaagaggttacggacaacaatggagtcaagaccatcgccaataaccttaccagcacggtccaggtcttcacggactcagactatcagctcccgtacgtgctcgggtcggctcacgagggctgcctcccgccgttcccagcggacgttttcatgattcctcagtacgggtatctgacgcttaatgatggaagccaggccgtgggtcgttcgtccttttactgcctggaatatttcccgtcgcaaatgctaagaacgggtaacaacttccagttcagctacgagtttgagaacgtacctttccatagcagctacgctcacagccaaagcctggaccgactaatgaatccactcatcgaccaatacttgtactatctctcaaagactattaacggttctggacagaatcaacaaacgctaaaattcagtgtggccggacccagcaacatggctgtccagggaagaaactacatacctggacccagctaccgacaacaacgtgtctcaaccactgtgactcaaaacaacaacagcgaatttgcttggcctggagcttcttcttgggctctcaatggacgtaatagcttgatgaatcctggacctgctatggccagccacaaagaaggagaggaccgtttctttcctttgtctggatctttaatttttggcaaacaaggaactggaagagacaacgtggatgcggacaaagtcatgataaccaacgaagaagaaattaaaactactaacccggtagcaacggagtcctatggacaagtggccacaaaccaccagagtgcccaagcacgggcgcagaccggctgggttcaaaaccaaggaatacttccgggtatggtttggcaggacagagatgtgtacctgcaaggacccatttgggccaaaattcctcacacggacggcaactttcacccttctccgctgatgggagggtttggaatgaagcacccgcctcctcagatcctcatcaaaaacacacctgtacctgcggatcctccaacggccttcaacaaggacaagctgaactctttcatcacccagtattctactggccaagtcagcgtggagatcgagtgggagctgcagaaggaaaacagcaagcgctggaacccggagatccagtacacttccaactattacaagtctaataatgttgaatttgctgttaatactgaaggtgtatatagtgaaccccgccccattggcaccagatacctgactcgtaatctgtaattgcttgttaatcaataaaccgtttaattcgtttcagttgaactgcggcc

SEQ ID NO: 944 - DNA, 2601 bp, synthetic construct
  source 1..2601: mol_type = other DNA; note = Description of Artificial Sequence: Synthetic polynucleotide
ccatcgacgtcagacgcggaagcttcgatcaactacgcggacaggtaccaaaacaaatgttctcgtcacgtgggcatgaatctgatgctgtttccctgcagacaatgcgagagactgaatcagaattcaaatatctgcttcactcacggtgtcaaagactgtttagagtgctttcccgtgtcagaatctcaacccgtttctgtcgtcaaaaaggcgtatcagaaactgtgctacattcatcacatcatgggaaaggtgccagacgcttgcactgcttgcgacctggtcaatgtggacttggatgactgtgtttctgaacaataaatgacttaaaccaggtatggctgccgatggttatcttccagattggctcgaggacaaccttagtgaaggaattcgcgagtggtgggctttgaaacctggagcccctcaacccaaggcaaatcaacaacatcaagacaacgctcgaggtcttgtgcttccgggttacaaataccttggacccggcaacggactcgacaagggggagccggtcaacgcagtagacgcggcggccctcgagcacgacaaggcctacgaccagcagctcaaggccggagacaacccgtacctcaagtacaaccacgccgacgccgagttccaggagcggctcaaagaagatacgtcttttgggggcaacctcgggcgagcagtcttccaggccaaaaagaggcttcttgaacctcttggtctggttgaggaagcggctaagacggctcctggaaagaagaggcctgtagagcagtctcctcaggaaccggactcctccgcgggtattggcaaatcgggtgcacagcccgctaaaaagagactcaatttcggtcagactggcgacacagagtcagtcccagaccctcaaccaatcggagaacctcccgcagccccctcaggtgtgggatctcttacaatggcttcaggtggtggcgcaccagtggcagacaataacgaaggtgccgatggagtgggtagttcctcgggaaattggcattgcgattcccaatggctgggggacagagtcatcaccaccagcacccgaacctgggccctgcccacctacaacaatcacctctacaagcaaatctccaacagcacatctggaggatcttcaaatgacaacgcctacttcggctacagcaccccctgggggtattttgacttcaacagattccactgccacttctcaccacgtgactggcagcgactcatcaacaacaactggggatttcggcctaagcgactcaacttcaagctcttcaacattcaggtcaaagaggttacggacaacaatggagtcaagaccatcgccaataaccttaccagcacggtccaggtcttcacggactcagactatcagctcccgtacgtgctcgggtcggctcacgagggctgcctcccgccgttcccagcggacgttttcatgattcctcagtacgggtatctgacgcttaatgatggaagccaggccgtgggtcgttcgtccttttactgcctggaatatttcccgtcgcaaatgctaagaacgggtaacaacttccagttcagctacgagtttgagaacgtacctttccatagcagctacgctcacagccaaagcctggaccgactaatgaatccactcatcgaccaatacttgtactatctctcaaagactattaacggttctggacagaatcaacaaacgctaaaattcagtgtggccggacccagcaacatggctgtccagggaagaaactacatacctggacccagctaccgacaacaacgtgtctcaaccactgtgactcaaaacaacaacagcgaatttgcttggcctggagcttcttcttgggctctcaatggacgtaatagcttgatgaatcctggacctgctatggccagccacaaagaaggagaggaccgtttctttcctttgtctggatctttaatttttggcaaacaaggaactggaagagacaacgtggatgcggacaaagtcatgataaccaacgaagaagaaattaaaactactaacccggtagcaacggagtcctatggacaagtggccacaaaccaccagagtgcccaagcacaggcgcagaccggctgggttcaaaaccaaggaatacttccgggtatggtttggcaggacagagatgtgtacctgcaaggacccatttgggccaaaattcctcacacggacggcaactttcacccttctccgctgatgggagggtttggaatgaagcacccgcctcctcagatcctcatcaaaaacacacctgtacctgcggatcctccaacggccttcaacaaggacaagctgaactctttcatcacccagtattctactggccaagtcagcgtggagatcgagtgggagctgcagaaggaaaacagcaagcgctggaacccggagatccagtacacttccaactattacaagtctaataatgttgaatttgctgttaatactgaaggtgtatatagtgaaccccgccccattggcaccagatacctgactcgtaatctgtaattgcttgttaatcaataaaccgtttaattcgtttcagttgaactgcggcc

SEQ ID NO: 945 - DNA, 2580 bp, synthetic construct
  source 1..2580: mol_type = other DNA; note = Description of Artificial Sequence: Synthetic polynucleotide
ccatcgacgtcagacgcggaagcttcgatcaactacgcggacaggtaccaaaacaaatgttctcgtcacgtgggcatgaatctgatgctgtttccctgcagacaatgcgagagactgaatcagaattcaaatatctgcttcactcacggtgtcaaagactgtttagagtgctttcccgtgtcagaatctcaacccgtttctgtcgtcaaaaaggcgtatcagaaactgtgctacattcatcacatcatgggaaaggtgccagacgcttgcactgcttgcgacctggtcaatgtggacttggatgactgtgtttctgaacaataaatgacttaaaccaggtatggctgccgatggttatcttccagattggctcgaggacaaccttagtgaaggaattcgcgagtggtgggctttgaaacctggagcccctcaacccaaggcaaatcaacaacatcaagacaacgctcgaggtcttgtgcttccgggttacaaataccttggacccggcaacggactcgacaagggggagccggtcaacgcagcagacgcggcggccctcgagcacgacaaggcctacgaccagcagctcaaggccggagacaacccgtacctcaagtacaaccacgccgacgccgagttccaggagcggctcaaagaagatacgtcttttgggggcaacctcgggcgagcagtcttccaggccaaaaagaggcttcttgaacctcttggtctggttgaggaagcggctaagacggctcctggaaagaagaggcctgtagagcagtctcctcgggaaccggactcctccgcgggtattggcaaatcgggtgcacagcccgctaaaaagagactcaatttcggtcagactggcgacacagagtcagtcccagaccctcaaccaatcggagaacctcccgcagccccctcaggtgtgggatctcttacaatggcttcaggtggtggcgcaccagtggcagacaataacgaaggtgccgatggagtgggtagttcctcgggaaattggcattgcgattcccaatggctgggggacagagtcatcaccaccagcacccgaacctgggccctgcccacctacaacaatcacctctacaagcaaatctccaacagcacatctggaggatcttcaaatgacaacgcctacttcggctacagcaccccctgggggtattttgacttcaacagattccactgccacttctcaccacgtgactggcagcgactcatcaacaacaactggggattccggcctaagcgactcaacttcaagctcttcaacattcaggtcaaagaggttacggacaacaatggagtcaagaccatcgccaataaccttaccagcacggtccaggtcttcacggactcagactatcagctcccgtacgtgctcgggtcggctcacgagggctgcctcccgccgttcccagcggacgttttcatgattcctcagtacgggtatctgacgcttaatgatggaagccaggccgtgggtcgttcgtccttttactgcctggaatatttcccgtcgcaaatgctaagaacgggtaacaacttccagttcagctacgagtttgagaacgtacctttccatagcagctacgctcacagccaaagcctggaccgactaatgaatccactcatcgaccaatacttgtactatctctcaaagactattaacggttctggacagaatcaacaaacgctaaaattcagtgtggccggacccagcaacatggctgtccagggaagaaactacatacctggacccagctaccgacaacaacgtgtctcaaccactgtgactcaaaacaacaacagcgaatttgcttggcctggagcttcttcttgggctctcaatggacgtaatagcttgatgaatcctggacctgctatggccagccacaaagaaggagaggaccgtttctttcctttgtctggatctttaatttttggcaaacaaggaactggaagagacaacgtggatgcggacaaagtcatgataaccaacgaagaagaaattaaaactactaacccggtagcaacggagtcctatggacaagtggccacaaaccaccagagtgcccaagcacaggcgcagaccggctgggttcaaaaccaaggaatacttccgggtatggtttggcaggacagagatgtgtacctgcaaggacccatttgggccaaaattcctcacacggacggcaactttcacccttctccgctgatgggagggtttggaatgaagcacccgcctcctcagatcctcatcaaaaacacacctgtacctgcggatcctccaacggccttcaacaaggacaagctgaactctttcatcacccagtattctactggccaagtcagcgtggagatcgagtgggaactgcagaaggaaaacagcaagcgctggaacccggagatccagtacacttccaactattacaagtctaataatgttgaatttgctgttaatactgaaggtgtatatagtgaaccccgccccattggcaccagatacctgactcgtaatctgtaattgcttgttaatcaataaaccgtttaatt

SEQ ID NO: 946 - DNA, 2601 bp, synthetic construct
  source 1..2601: mol_type = other DNA; note = Description of Artificial Sequence: Synthetic polynucleotide
ccatcgacgtcagacgcggaagcttcgatcaactacgcggacaggtaccaaaacaaatgttctcgtcacgtgggcatgaatctgatgctgtttccctgcagacaatgcgagagactgaatcagaattcaaatatctgcttcactcacggtgtcaaagactgtttagagtgctttcccgtgtcagaatctcaacccgtttctgtcgtcaaaaaggcgtatcagaaactgtgctacattcatcacatcatgggaaaggtgccagacgcttgcactgcttgcgacctggtcaatgtggacttggatgactgtgtttctgaacaataaatgacttaaaccaggtatggctgccgatggttatcttccagattggctcgaggacaaccttagtgaaggaattcgcgagtggtgggctttgaaacctggagcccctcaacccaaggcaaatcaacaacatcaagacaacgctcgaggtcttgtgcttccgggttacaaataccttggacccggcaacggactcgacaagggggagccggtcaacgcagcagacgcggcggccctcgagcacgacaaggcctacgaccagcagctcaaggccggagacaacccgtacctcaagtacaaccacgccgacgccgagttccaggagcggctcaaagaagatacgtcttttgggggcaacctcgggcgagcagtctttcaggccaaaaagaggcttcttgaacctcttggtctggttgaggaagcggctaagacggctcctggaaagaagaggcctgtagagcagtctcctcaggaaccggactcctccgcgggtattggcaaatcgggtgcacagcccgctaaaaagagactcaatttcggtcagactggcgacacagagtcagtcccagaccctcaaccaatcggagaacctcccgcagccccctcaggtgtgggatctcttacaatggcttcatgtggtggcgcaccagtggcagacaataacgaaggtgccgatggagtgggtagttcctcgggaaattggcattgcgattcccaatggctgggggacagagtcatcaccaccagcacccgaacctgggccctgcccacctacaacaatcacctctacaagcaaatctccaacagcacatctggaggatcttcaaatgacaacgcctacttcggctacagcaccccctgggggtattttgacttcaacagattccactgccacttctcaccacgtgactggcagcgactcatcaacaacaactggggattccggcctaagcgactcaacttcaagctcttcaacattcaggtcaaagaggttacggacaacaatggagtcaagaccatcgccaataaccttaccagcacggtccaggtcttcacggactcagactatcagctcccgtacgtgctcgggtcggctcacgagggctgcctcccgccgttcccagcggacgttttcatgattcctcagtacgggtatctgacgcttaatgatggaagccaggccgtgggtcgttcgtccttttactgcctggaatatttcccgtcgcaaatgctaagaacgggtaacaacttccagttcagctacgagtttgagaacgtacctttccatagcagctacgctcacagccaaagcctggaccgactaatgaatccactcatcgaccaatacttgtactatctctcaaagactattaacggttctggacagaatcaacaaacgctaaaattcagtgtggccggacccagcaacatggctgtccagggaagaaactacatacctggacccagctaccgacaacaacgtgtctcaaccactgtgactcaaaacaacaacagcgaatttgcttggcctggagcttcttcttgggctctcaatggacgtaatagcttgatgaatcctggacctgctatggccagccacaaagaaggagaggaccgtttctttcctttgtctggatctttaatttttggcaaacaaggaactggaagagacaacgtggatgcggacaaagtcatgataaccaacgaagaagaaattaaaactactaacccggtagcaacggagtcctatggacaagtggccacaaaccaccagagtgcccaagcacaggcgcagaccggctgggttcaaaaccaaggaatacttccgggtatggtttggcaggacagagatgtgtacctgcaaggacccatttgggccaaaattcctcacacggacggcaactttcacccttctccgctgatgggagggtttggaatgaagcacccgcctcctcagatcctcatcaaaaacacacctgtacctgcggatcctccaacggccttcaacaaggacaagctgaactctttcatcacccagtattctactggccaagtcagcgtggagatcgagtgggagctgcagaaggaaaacagcaagcgctggaacccggagatccagtacacttccaactattacaagtctaataatgttgaatttgctgttaatactgaaggtgtatatagtgaaccccgccccattggcaccagatacctgactcgtaatctgtaattgcttgttaatcaataaaccgtttaattcgtttcagttgaactgcggcc

SEQ ID NO: 947 - DNA, 2601 bp, synthetic construct
  source 1..2601: mol_type = other DNA; note = Description of Artificial Sequence: Synthetic polynucleotide
ccatcgacgtcagacgcggaagcttcgatcaactacgcggacaggtaccaaaacaaatgttctcgtcacgtgggcatgaatctgatgctgtttccctgcagacaatgcgagagactgaatcagaattcaaatatctgcttcactcacggtgtcaaagactgtttagagtgctttcccgtgtcagaatctcaacccgtttctgtcgtcaaaaaggcgtatcagaaactgtgctacattcatcacatcatgggaaaggtgccagacgcttgcactgcttgcgacctggtcaatgtggacttggatgactgtgtttctgaacaataaatgacttaaaccaggtatggctgccgatggttatcttccagattggctcgaggacaaccttagtgaaggaattcgcgagtggtgggctttgaaacctggagcccctcaacccaaggcaaatcaacaacatcaagacaacgctcgaggtcttgtgcttccgggttacaaataccttggacccggcaacggactcgacaagggggagccgatcaacgcagcagacgcggcggccctcgagcacgacaaggcctacgaccagcagctcaaggccggagacaacccgtacctcaagtacaaccacgccgacgccgagttccaggagcggctcaaagaagatacgtcttttgggggcaacctcgggcgagcagtcttccaggccaaaaagaggcttcttgaacctcttggtctggttgaggaagcggctaagacggctcctggaaagaagaggcctgtagagcagtctcctcaggaaccggactcctccgcgggtattggcaaatcgggtgcacagcccgctaaaaagagactcaatttcggtcagactggcgacacagagtcagtcccagaccctcaaccaatcggagaacctcccgcagccccctcaggtgtgggatctcttacaatggcttcaggtggtggcgcaccagtggcagacaataacgaaggtgccgatggagtgggtagttcctcgggaaattggcattgcgattcccaatggctgggggacagagtcatcaccaccagcacccgaacctgggccctgcccacctacaacaatcacctctacaagcaaatctccaacagcacatctggaggatcttcaaatgacaacgcctacttcggctacagcaccccctgggggtattttgacttcaacagattccactgccacttctcaccacgtgactggcagcgactcatcaacaacaactggggattccggcctaagcgactcaacttcaagctcttcaacattcaggtcaaagaggttacggacaacaatggagtcaagaccatcgccaataaccttaccagcacggtccaggtcttcacggactcagactatcagctcccgtacgtgctcgggtcggctcacgagggctgcctcccgccgttcccagcggacgttttcatgattcctcagtacgggtatctgacgcttaatgatggaagccaggccgtgggtcgttcgtccttttactgcctggaatatttcccgtcgcaaatgctaagaacgggtaacaacttccagttcagctacgagtttgagaacgtacctttccatagcagctacgctcacagccaaagcctggaccgactaatgaatccactcatcgaccaatacttgtactatctctcaaagactattaacggttctggacagaatcaacaaacgctaaaattcagtgtggccggacccagcaacatggctgtccagggaagaaactacatacctggacccagctaccgacaacaacgtgtctcaaccactgtgactcaaaacaacaacagcgaatttgcttggcctggagcttcttcttgggctctcaatggacgtaatagcttgatgaatcctggacctgctatggccagccacaaagaaggagaggaccgtttctttcctttgtctggatctttaatttttggcaaacaaggaactggaagagacaacgtggatgcggacaaagtcatgataaccaacgaagaagaaattaaaactactaacccggtagcaacggagtcctatggacaagtggccacaaaccaccagagtgcccaagcacaggcgcagaccggctgggttcaaaaccaaggaatacttccgggtatggtttggcaggacagagatgtgtacctgcaaggacccatttgggccaaaattcctcacacgtacggcaactttcacccttctccgctgatgggagggtttggaatgaagcacccgcctcctcagatcctcatcaaaaacacacctgtacctgcggatcctccaacggccttcaacaaggacaagctgaactctttcatcacccagtattctactggccaagtcagcgtggagatcgagtgggagctgcagaaggaaaacagcaagcgctggaacccggagatccagtacacttccaactattacaagtctaataatgttgaatttgctgttaatactgaaggtgtatatagtgaaccccgccccattggcaccagatacctgactcgtaatctgtaattgcttgttaatcaataaaccgtttaattcgtttcagttgaactgcggcc

SEQ ID NO: 948 - DNA, 2601 bp, synthetic construct
  source 1..2601: mol_type = other DNA; note = Description of Artificial Sequence: Synthetic polynucleotide
ccatcgacgtcagacgcggaagcttcgatcaactacgcggacaggtaccaaaacaaatgttctcgccacgtgggcatgaatctgatgctgtttccctgcagacaatgcgagagactgaatcagaattcaaatatctgcttcactcacggtgtcaaagactgtttagagtgctttcccgtgtcagaatctcaacccgtttctgtcgtcaaaaaggcgtatcagaaactgtgctacattcatcacatcatgggaaaggtgccagacgcttgcactgcttgcgacctggtcaatgtggacttggatgactgtgtttctgaacaataaatgacttaaaccaggtatggctgccgatggttatcttccagattggctcgaggacaaccttagtgaaggaattcgcgagtggtgggctttgaaacctggagcccctcaacccaaggcaaatcaacaacatcaagacaacgctcgaggtcttgtgcttccgggttacaaataccttggacccggcaacggactcgacaagggggagccggtcaacgcagcagacgcggcggccctcgagcacgacaaggcctacgaccagcagctcaaggccggagacaacccgtacctcaagtacaaccacgccgacgccgagttccaggagcggctcaaagaagatacgtcttttgggggcaacctcgggcgagcagtcttccaggccaaaaagaggcttcttgaacctcttggtctggttgaggaagcggctaagacggctcctggaaagaagaggcctgtagagcagtctcctcaggaaccggactcctccgcgggtattggcaaatcgggtgcacagcccgctaaaaagagactcaatttcggtcagactggcgacacagagtcagtcccagaccctcaaccaatcggagaacctcccgctgccccctcaggtgtgggatctcttacaatggcttcaggtggtggcgcaccagtggcagacaataacgaaggtgccgatggagtgggtagttcctcgggaaattggcattgcgattcccaatggctgggggacagagtcatcaccaccagcacccgaacctgggccctgcccacctacaacaatcacctctacaagcaaatctccaacagcacatctggaggatcttcaaatgacaacgcctacttcggctacagcaccccctgggggtattttgacttcaacagattccactgccacttctcaccacatgactggcagcgactcatcaacaacaactggggattccggcctaagcgactcaacttcaagctcttcaacattcaggtcaaagaggttacggacaacaatggagtcaagaccatcgccaataaccttaccagcacggtccaggtcttcacggactcagactatcagctcccgtacgtgctcgggtcggctcacgagggctgcctcccgccgttcccagcggacgttttcatgattcctcagtacgggtatctgacgcttaatgatggaagccaggccgtgggtcgttcgtccttttactgcctggaatatttcccgtcgcaaatgctaagaacgggtaacaacttccagttcagctacgagtttgagaacgtacctttccatagcagctacgctcacagccaaagcctggaccgactaatgaatccactcatcgaccaatacttgtactatctctcaaagactattaacggttctggacagaatcaacaaacgctaaaattcaatgtggccggacccagcaacatggctgtccagggaagaaactacatacctggacccagctaccgacaacaacgtgtctcaaccactgtgactcaaaacaacaacagcgaatttgcctggcctagagcttcttcttgggctctcaatggacgtaatagcttgatgaatcctggacctgctatggccagccacaaagaaggagaggaccgtttctttcctttgtctggatctttaatttttggcaaacaaggaactggaagagacaacgtggatgcggacaaagtcatgataaccaacgaagaagaaattaaaactactaacccggtagcaacggagtcctatggacaagtggccacaaaccaccagagtgcccaagcacaggcgcagaccggctgggttcaaaaccaaggaatacttccgggtatggtttggcaggacagagatgtgtacctgcaaggacccatttgggccaaaattcctcacacggacggcaactttcacccttctccgctgatgggagggtttggaatgaagcacccgcctcctcagatcctcatcaaaaacacacctgtacctgcggatcctccaacggccttcaacaaggacaagctgaactctttcatcacccagtattctactggccaagtcagcatggagatcgagtgggagctgcagaaggaaaacagcaagcgctggaacccggagatccagtacacttccaactattacaagtctaataatgttgaatttgctgttaatactgaaggtgtatatagtgaaccccgccccattggcaccagatacctgactcgtaatctgtaattgcttgttaatcaataaaccgtttaattcgtttcagttgaactgcggcc

SEQ ID NO: 949 - DNA, 2601 bp, synthetic construct
  source 1..2601: mol_type = other DNA; note = Description of Artificial Sequence: Synthetic polynucleotide
ccatcgacgtcagacgcggaagcttcgatcaactacgcggacaggtaccaaaacaaatgttctcgtcacgtgggcatgaatctgatgctgtttccctgcagacaatgcgagagactgaatcagaattcaaatatctgcttcactcacggtgtcaaagactgtttagagtgctttcccgtgtcagaatctcaacccgtttctgtcgtcaaaaaggcgtatcagaaactgtgctacattcatcacatcatgggaaaggtgccagacgcttgcactgcttgcgacctggtcaatgtggacttggatgactgtgtttctgaacaataaatgacttaaaccaggtatggctgccgatggttatcttccagattggctcgaggacaaccttagtgaaggaattcgcgagtggtgggctttgaaacctggagcccctcaacccaaggcaaatcaacaacatcaagacaacgctcgaggtcttgtgcttccgggttacaaataccttggacccggcaacggactcgacaagggggagccggtcaacgcagcagacgcggcggccctcgagcacgacaaggcctacgaccagcagctcaaggccggagacaacccgtacctcaagtacaaccacgccgacgccgagttccaggagcggctcaaagaagatacgtcttttgggggcaacctcgggcgagcagtcttccaggccaaaaagaggcttcttgaacctcttggtctggttgaggaagcggctaagacggctcctggaaagaagaggcctgtagagcagtctcctcaggaaccggactcctccgcgggtattggcaaatcgggtgcacagcccgctaaaaagagactcaatttcggtcagactggcgacacagagtcagtcccagaccctcaaccaatcggagaacctcccgcagccccctcaggtgtgggatctcttacaatggcttcaggtggtggcgcaccagtggcagacaataacgaaggtgccgatggagtgggtagttcctcgggaaattggcattgcgattcccaatggctgggggacagagtcatcaccaccagcacccgaacctgggccctgcccacctacaacaatcacctctacaagcaaatctccaacagcacatctggaggatcttcaaatgacaacgcctacttcggctacagcaccccctgggggtattttgacttcaacagattccactgccacttctcaccacgtgactggcagcgactcatcaacaacaactggggattccggcctaagcgactcaacttcaagctcttcaacattcaggtcaaagaggttacggacaacaatggagtcaagaccatcgccaataaccttaccagcacggtccaggtcttcacggactcagactatcagctcccgtacgtgctcgggtcggctcacgagggctgcctcccgccgttcccagcggacgttttcatgattcctcagtacgggtatctgacgcttaatgatggaagccaggccgtgggtcgttcgtccttttactgcctggaatatttcccgtcgcaaatgctaagaacgggtaacaacttccagttcagctacgagtttgagaacgtacctttccatagcagctacgctcacagccaaagcctggaccgactaatgaatccactcatcgaccaatacttgtactatctctcaaagactattaacggttctggacagaatcaacaaacgctaaaattcagtgtggccggacccagcaacatggctgtccagggaagaaactacatacctggacccagctaccgacaacaacgtgtctcaaccactgtgactcaaaacaacaacagcgaatttgcttggcctagagcttcttcttgggctctcaatggacgtaatagcttgatgaatcctggacctgctatggccagccacaaagaaggagaggaccgtttctttcctttgtctggatctttaatttttggcaaacaaggaactggaagagacaacgtggatgcggacaaagtcatgataaccaacgaagaagaaattaaaactactaacccggtagcaacggagtcctatggacaagtggccacaaaccaccagagtgcccaagcacaggcgcagaccggctgggttcaaaaccaaggaatacttccgggtatggtttggcaggacagagatgtgtacctgcaaggacccatttgggccaaaattcctcacacggacggcaactttcacccttctccgctgatgggagggtttggaatgaagcacccgcctcctcagatcctcatcaaaaacacacctgtacctgcggatcctccaacggccttcaacaaggacaagctgaactctttcatcacccagtattctactggccaagtcagcgtggagatcgagtgggagctgcagaaggaaaacagcaagcgctggaacccggagatccagtacacttccaactattacaagtctaataatgttgaatttgctgttaatactgaaggtgtatatagtgaaccccgccccattggcaccagatacctgactcgtaatctgtaattgcttgttaatcaataaaccgtttaattcgtttcagttgaactgcggcc

SEQ ID NO: 950 - DNA, 2601 bp, synthetic construct
  source 1..2601: mol_type = other DNA; note = Description of Artificial Sequence: Synthetic polynucleotide
ccatcgacgtcagacgcggaagcttcgatcaactacgcggacaggtaccaaaacaaatgttctcgtcacgtgggcatgaatctgatgctgtttccctgcagacaatgcgagagactgaatcagaattcaaatatctgcttcactcacggtgtcaaagactgtttagagtgctttcccgtgtcagaatctcaacccgtttctgtcgtcaaaaaggcgtatcagaaactgtgctacattcatcacatcatgggaaaggtgccagacgcttgcactgcttgcgacctggtcaatgtggacttggatgactgtgtttctgaacaataaatgacttaaaccaggtatggctgccgatggttatcttccagattggctcgaggacaaccttagtgaaggaattcgcgagtggtgggctttgaaacctggagcccctcaacccaaggcaaatcaacaacatcaagacaacgctcgaggtcttgtgcttccgggttacaaataccttggacccggcaacggactcgacaagggggagccggtcaacgcagcagacgcggcggccctcgagcacgacaaggcctacgaccagcagctcaaggccggagacaacccgtacctcaagtacaaccacgccgacgccgagttccaggagcggctcaaagaagatacgtcttttgggggcaacctcgggcgagcagtcttccaggccaaaaagaggcttcttgaacctcttggtctggttgaggaagcggctaagacggctcctggaaagaagaggcctgtagagcagtctcctcaggaaccggactcctccgcgggtattggcaaatcgggtgcacagcccgctaaaaagagactcaatttcggtcagactggcgacacagagtcagtcccagaccctcaaccaatcggagaacctcccgcagccccctcaggtgtgggatctcttacaatggcttcaggtggtggcgcaccagtggcagacaataacgaaggtgccgatggagtgggtagttcctcgggaaattggcattgcgattcccaatggctgggggacagagtcatcaccaccagcacccgaacctgggccctgcccacctacaacaatcacctctacaagcaaatctccaacagcacatctggaggatcttcaaatgacaacgcctacttcggctacagcaccccctgggggtattttgacttcaacagattccactgccacttctcaccacgtgactggcagcgactcatcaacaacaactggggattccggcctaagcgactcaacttcaagctcttcaacattcaggtcaaagaggttacggacaacaatggagtcaagaccatcgccaataaccttaccagcacggtccaggtcttcacggactcagactatcagctcccgtacgtgctcgggtcggctcacgagggctgcctcccgccgttcccagcggacgttttcatgattcctcagtacgggtatctgacgcttaatgatggaagccaggccgtgggtcgttcgtccttttactgcctggaatatttcccgtcgcaaatgctaagaacgggtaacaacttccagttcagctacgagtttgagaacgtacctttccatagcagctacgctcacagccaaagcctggaccgactaatgaatccactcatcgaccaatacttgtactatctctcaaagactattaacggttctggacagaatcaacaaacgctaaaattcagtgtggccggacccagcaacatggctgtccagggaagaaactacatacctggacccagctaccgacaacaacgtgtctcaaccactgtgactcaaaacaacaacagcgaatttgcttggcctagagcttcttcttgggctctcaatggacgtaatagcttgatgaatcctggacctgctatggccagccacaaagaaggagaggaccgtttctttcctttgtctggatctttaatttttggcaaacaaggaactggaagagacaacgtggatgcggacaaagtcatgataaccaacgaagaagaaattaaaactactaacccggtagcaacggagtcctatggacaagtggccacaaaccaccagagtgcccaagcacaggcgcagaccggctgggttcaaaaccaaggaatacttccgggtatggtttggcaggacagagatgtgtacctgcaaggacccatttgggccaaaattcctcacacggacggcaactttcacccttctccgctgatgggagggtttggaatgaagcacccgcctcctcagatcctcatcaaaaacacacctgtacctgcggatcctccaacggccttcaacaaggacaagctgaactctttcatcacccagtattctactggccaagtcagcgtggagatcgagtgggagcggcagaaggaaaacagcaagcgctggaacccggagatccagtacacttccaactattacaagtctaataatgttgaatttgctgttaatactgaaggtgtatatagtgaaccccgccccattggcaccagatacctgactcgtaatctgtaattgcttgttaatcaataaaccgtttaattcgtttcagttgaactgcggcc

SEQ ID NO: 951 - DNA, 2601 bp, synthetic construct
  source 1..2601: mol_type = other DNA; note = Description of Artificial Sequence: Synthetic polynucleotide
ccatcgacgtcagacgcggaagcttcgatcaactacgcggacaggtaccaaaacaaatgttctcgtcacgtgggcatgaatctgatgctgtttccctgcagacaatgcgagagactgaatcagaattcaaatatctgcttcactcacggtgtcaaagactgtttagagtgctttcccgtgtcagaatctcaacccgtttctgtcgtcaaaaaggcgtatcagaaactgtgctacattcatcacatcatgggaaaggtgccagacgcttgcactgcttgcgacctggtcaatgtggacttggatgactgtgtttctgaacaataaatgacttaaaccaggtatggctgccgatggttatcttccagattggctcgaggacaaccttagtgaaggaattcgcgagtggtgggctttgaaacctggagcccctcaacccaaggcaaatcaacaacatcaagacaacgctcgaggtcttgtgcttccgggttacaaataccttggacccggcaacggactcgacaagggggagccggtcaacgcagcagacgcggcggccctcgagcacgacaaggcctacgaccagcagctcaaggccggagacaacccgtacctcaagtacaaccacgccgacgccgagttccaggagcggctcaaagaagatacgtcttttgggggcaacctcgggcgagcagtcttccaggccaaaaagaggcttcttgaacctcttggtctggttgaggaagcggctaagacggctcctggaaagaagaggcctgtagagcagtctcctcaggaaccggactcctccgcgggtattggcaaatcgggtgcacagcccgctaaaaagagactcaatttcggtcagactggcgacacagagtcagtcccagaccctcaaccaatcggagaacctcccgcagccccctcaggtgtgggatctcttacaatggcttcaggtggtggcgcaccagtggcagacaataacgaaggtgccgatggagtgggtagttcctcgggaaattggcattgcgattcccaatggctgggggacagagtcatcaccaccagcacccgaacctgggccctgcccacctacaacaatcacctctacaagcaaatctccaacagcacatctggaggatcttcaaatgacaacgcctacttcggctacagcaccccctgggggtattttgacttcaacagattccactgccacttctcaccacgtgactggcagcgactcatcaacaacaactggggattccggcctaagcgactcaacttcaagctcttcaacattcaggtcaaagaggttacggacaacaatggagtcaagaccatcgccaataaccttaccagcacggtccaggtcttcgcggactcagactatcagctcccgtacgtgctcgggtcggctcacgagggctgcctcccgccgttcccagcggacgttttcatgattcctcagtacgggtatctgacgcttaatgatggaagccaggccgtgggtcgttcgtccttttactgcctggaatatttcccgtcgcaaatgctaagaacgggtaacaacttccagttcagctacgagtttgagaacgtacctttccatagcagctacgctcacagccaaagcctggaccgactaatgaatccactcatcgaccaatacttgtactatctctcaaagactattaacggttctggacagaatcaacaaacgctaaaattcagtgtggccggacccagcaacatggctgtccagggaagaaactacatacctggacccagctaccgacaacaacgtgtctcaaccactgtgactcaaaacaacaacagcgaatttgcttggcctagagcttcttcttgggctctcaatggacgtaatagcttgatgaatcctggacctgctatggccagccacaaagaaggagaggaccgtttctttcctttgtctggatctttaatttttggcaaacaaggaactggaagagacaacgtggatgcggacaaagtcatgataaccaacgaagaagaaattaaaactactaacccggtagcaacggagtcctatggacaagtggccacaaaccaccagagtgcccaagcacaggcgcagaccggctgggttcaaaaccaaggaatacttccgggtatggtttggcaggacagagatgtgtacctgcaaggacccatttgggccaaaattcctcacacggacggcaactttcacccttctccgctgatgggagggtttggaatgaagcacccgcctcctcagatcctcatcaaaaacacacctgtacctgcggatcctccaacggccttcaacaaggacaagctgaactctttcatcacccagtattctactggccaagtcagcgtggagatcgagtgggagctgcagaaggaaaacagcaagcgctggaacccggagatccagtacacttccaactattacaagtctaataatgttgaatttgctgttaatactgaaggtgtatatagtgaaccccgccccattggcaccagatacctgactcgtaatctgtaattgcttgttaatcaataaaccgtttaattcgtttcagttgaactgcggcc

SEQ ID NO: 952 - DNA, 2601 bp, synthetic construct
  source 1..2601: mol_type = other DNA; note = Description of Artificial Sequence: Synthetic polynucleotide
ccatcgacgtcagacgcggaagcttcgatcaactacgcggacaggtaccaaaacaaatgttctcgtcacgtgggcatgaatctgatgctgtttccctgcagacaatgcgagagactgaatcagaattcaaatatctgcttcactcacggtgtcaaagactgtttagagtgctttcccgtgtcagaatctcaacccgtttctgtcgtcaaaaaggcgtatcagaaactgtgctacattcatcacatcatgggaaaggtgccagacgcttgcactgcttgcgacctggtcaatgtggacttggatgactgtgtttctgaacaataaatgacttaaaccaggtatggctgccgatggttatcttccagattggctcgaggacaaccttagtgaaggaattcgcgagtggtgggctttgaaacctggagcccctcaacccaaggcaaatcaacaacatcaagacaacgctcgaggtcttgtgcttccgggttacaaataccttggacccggcaacggactcgacaagggggagccggtcaacgcagcagacgcggcggccctcgagcacgacaaggcctacgaccagcagctcaaggccggagacaacccgtacctcaagtacaaccacgccgacgccgagttccaggagcggctcaaagaagatacgtcttttgggggcaacctcgggcgagcagtcttccaggccaaaaagaggcttcttgaacctcttggtctggttgaggaagcggctaagacggctcctggaaagaagaggcctgtagagcagtctcctcaggaaccggactcctccgcgggtattggcaaatcgggtgcacagcccgctaaaaagagactcaatttcggtcagactggcgacacagagtcagtcccagaccctcaaccaatcggagaacctcccgcagccccctcaggtgtgggatctcttacaatggcttcaggtggtggcgcaccagtggcagacaataacgaaggtgccgatggagtgggtagttcctcgggaaattggcattgcgattcccaatggctgggggacagagtcatcaccaccagcacccgaacctgggccctgcccacctacaacaatcacctctacaagcaaatctccaacagcacatctggaggatcttcaaatgacaacgcctacttcggctacagcaccccctgggggtattttgacttcaacagattccactgccacttctcaccacgtgactggcagcgactcatcaacaacaactggggattccggcctaagcgactcaacttcaagctcttcaacattcaggtcaaagaggttacggacaacaatggagtcaagaccatcgccaataaccttaccagcacggtccaggtcttcacggactcagactatcagctcccgtacgtgctcgggtcggctcacgagggctgcctcccgccgttcccagcggacgttttcatgattcctcagtacgggtatctgacgcttaatgatggaagccaggccgtgggtcgttcgtccttttactgcctggaatatttcccgtcgcaaatgctaagaacgggtaacaacttccagttcagctacgagtttgagaacgtacctttccatagcagctacgctcacagccaaagcctggaccgactaatgaatccactcatcgaccaatacttgtactatctctcaaagactattaacggttctggacagaatcaacaaacgctaaaattcagtgtggccggacccagcaacatggctgtccagggaagaaactacatacctggacccagctaccgacaacaacgtgtctcaaccactgtgactcaaaacaacaacagcgaaattgcttggcctagagcttcttcttgggctctcaatggacgtaatagcttgatgaatcctggacctgctatggccagccacaaagaaggagaggaccgtttctttcctttgtctggatctttaatttttggcaaacaaggaactggaagagacaacgtggatgcggacaaagtcatgataaccaacgaagaagaaattaaaactactaacccagtagcaacggagtcctatggacaagtggccacaaaccaccagagtgcccaagcacaggcgcagaccggctgggttcaaaaccaaggaatacttccgggtatggtttggcaggacagagatgtgtacctgcaaggacccatttgggccaaaattcctcacacggacggcaactttcacccttctccgctgatgggagggtttggaatgaagcacccgcctcctcagatcctcatcaaaaacacacctgtacctgcggatcctccaacggccttcaacaaggacaagctgaactctttcatcacccagtattctactggccaagtcagcgtggagatcgagtgggagctgcagaaggaaaacagcaagcgctggaacccggagatccagtacacttccaactattgcaagtctaataatgttgaatttgctgttaatactgaaggtgtatatagtgaaccccgccccattggcaccagatacctgactcgtaatctgtaattgcttgttaatcaataaaccgtttaattcgtttcagttgaactgcggcc

SEQ ID NO: 953 - DNA, 2601 bp, synthetic construct
  source 1..2601: mol_type = other DNA; note = Description of Artificial Sequence: Synthetic polynucleotide
ccatcgacgtcagacgcggaagcttcgatcaactacgcggacaggtaccaaaacaaatgttctcgtcacgtgggcatgaatctgatgctgtttccctgcagacaatgcgagagactgaatcagaattcaaatatctgcttcactcacggtgtcaaagactgtttagagtgctttcccgtgtcagaatctcaacccgtttctgtcgtcaaaaaggcgtatcagaaactgtgctacattcatcacatcatgggaaaggtgccagacgcttgcactgcttgcgacctggtcaatgtggacttggatgtctgtgtttctgaacaataaatgacttaaaccaggtatggctgccgatggttatcttccagattggctcgaggacaaccttagtgaaggaattcgcgagtggtgggctttgaaacctggagcccctcaacccaaggcaaatcaacaacatcaagacaacgctcgaggtcttgtgcttccgggttacaaataccttggacccggcaacggactcgataagggggagccggtcaacgcagcagacgcggcggccctcgagcacgacaaggcctacgaccagcagctcaaggccggagacaacccgtacctcaagtacaaccacgccgacgccgagttccaggagcggctcaaagaagatacgtcttttgggggcaacctcgggcgagcagtcttccaggccaaaaagaggcttcttgaacctcttggtctggttgaggaagcggctaagacggctcctggaaagaagaggcctgtagagcagtctcctcaggaaccggactcctccgcgggtattggcaaatcgggtgcacagcccgctaaaaagagactcaatttcggtcagactggcgacacagagtcagtcccagaccctcaaccaatcggagaacctcccgcagccccctcaggtgtgggatctcttacaatggcttcaggtggtggcgcaccagtggcagacaataacgaaggtgccgatggagtgggtagttcctcgggaaattggcattgcgattcccaatggctgggggacagagtcatcaccaccagcacccgaacctgggccctgcccacctacaacaatcacctctacaagcaaatctccaacagcacatctggaggatcttcaaatgacaacgcctacttcggctacagcaccccctgggggtattttgacttcaacagattccactgccacttctcaccacgtgactggcagcgactcatcaacaacaactggggattccggcctaagcgactcaacttcaagctcttcaacattcaggtcaaagaggttacggacaacaatggagtcaagaccatcgccaataaccttaccagcacggtccaggtcttcacggactcagactatcagctcccgtacgtgctcgggtcggctcacgagggctgcctcccgccgttcccagcggacgttttcatgattcctcagtacgggtatctgacgcttaatgatggaagccaggccgtgggtcgttcgtccttttactgcctggaatatttcccgtcgcaaatgctaagaacgggtaacaacttccagttcagctacgagtttgagaacgtacctttccatagcagctacgctcacagccaaagcctggaccgactaatgaatccactcatcgaccaatacttgtactatctctcaaagactattaacggttctggacagaatcaacaaacgctaaaattcagtgtggccggacccagcaacatggctgtccagggaagaaactacatacctggacccagctaccgacaacaacgtgtctcaaccactgtgactcaaaacaacaacagcgaatttgcttggcctagagcttcttcttgggctctcaatggacgtaatagcttgatgaatcctggacctgctatggccagccacaaagaaggagaggaccgtttctttcctttgtctggatctttaatttttggcaaacaaggaactggaagagacaacgtggatgcggacaaagtcatgataaccaacgaagaagaaattaaaactactaacccggtagcaacggagtcctatggacaagtggccacaaaccaccagagtgcccaagcacaggcgcagaccggctgggttcaaaaccaaggaatacttccgggtatggtttggcaggacagagatgtgtacctgcaaggacccatttgggccaaaattcctcacacggacggcaactttcacccttctccgctgatgggagggtttggaatgaagcacccgcctcctcagatcctcatcaaaaacacacctgtacctgcggatcctccaacggccttcaacaaggacaagctgaactctttcatcacccagtattctactggccaagtcagcgtggagatcgagtgggagctgcagaaggaaaacagcaagcgctggaacccggagatccagtacacttccaactattacaagtctaataatgttgaatttgctgttaatactgaaggtgtatatagtgaaccccgccccattggcaccagatacctgactcgtaatctgtaattgcttgttaatcaataaaccgtttaattcgtttcagttgaactgcggcc

SEQ ID NO: 954 - protein, 736 aa, synthetic construct
  source 1..736: note = Description of Artificial Sequence: Synthetic polypeptide
MTADGYLPDWLEDNLSEGIREWWALKPGAPQPKANQQHQDNARGLVLPGYKYLGPGNGLDKGEPVNAADAAALEHDKAYDQQLKAGDNPYLKYNHADAEFQERLKEDTSFGGNLGRAVFQAKKRLLEPLGLVEEAAKTAPGKKRPVEQSPQEPDSSAGIGKSGAQPAKKRLNFGQTGDTESVPDPQPIGEPPAAPSGVGSLTMASGGGAPVADNNEGADGVGSSSGNWHCDSQWLGDRVITTSTRTWALPTYNNHLYKQISNSTSGGSSNDNAYFGYSTPWGYFDFNRFHCHFSPRDWQRLINNNWGFRPKQLNFKLFNIQVKEVTDNNGVKTIANNLTSTVQVFTDSDYQLPYVLGSAHEGCLPPFPADVFMIPQYGYLTLNDGSQAVGRSSFYCLEYFPSQMLRTGNNFQFSYEFENVPFHSSYAHSQSLDRLMNPLIDQYLYYLSKTINGSGQNQQTLKFSVAGPSNMAVQGRNYIPGPSYRQQRVSTTVTQNNNSEFAWPGASSWALNGRNSLMNPGPAMASHKEGEDRFFPLSGSLIFGKQGTGRDNVDADKVMITNEEEIKTTNPVATESYGQVATNHQSAQAQAQTGWVQNQGILPGMVWQDRDVYLQGPIWAKIPHTDGNFHPSPLMGGFGMKHPPPQILIKNTPVPADPPTAFNKDKLNSFITQYSTGQVSVEIEWELQKENSKRWNPEIQYTSNYYKSNNVEFAVNTEGVYSEPRPIGTRYLTRNL

SEQ ID NO: 955 - protein, 736 aa, synthetic construct
  source 1..736: note = Description of Artificial Sequence: Synthetic polypeptide
MAADGYLPDWLEDNLSEGIREWWALKPGAPQPKANQQHQDNARGLVLPGYKYLGPGNGLDKGEPVNAADAAALEHDKAYDQQLKAGDNPYLKYNHADAEFQERLKEDTSFGGNLGRAVFQAKKRLLEPLGLVEEAAKTAPGKKRPVEQSPQEPDSSAGIGKSGAQPAKKRLNFGQTGDTESVPDPQPIGEPPAAPSGVGSLTMASGGGAPVADNNEGADGVGSSSGNWHCDSQWLGDRVITTSTRTWALPTYNNHLYKQISNSTSGGSSNDNAYFGYSTPWGYFDFNRFHCHFSPRDWQRLINNNWGFRPKRLNFKLFNIQVKEVTDNNGVKTIANNLTSTVQVFTDSDYQLPYVLGSAHEGCLPPFPADVFMIPQYGYLTLNDGSQAVGRSSFYCLEYFPSQMLRTGNNFQFSYEFENVPFHSSYAHSQSLDRLMNPLIDQYLYYLSKTINGSGQNQQTLKFSVAGPSNMAVQGRNYIPGPSYRQQRVSTTVTQNNNSEFAWPGASSWALNGRNSLMNPGPAMASHKEGEDRFFPLSGSLIFGKQGTGRDNVDADKVMITNEEEIKTTNPVATESYGQVATNHQSAQAQAQTGWVQNQGILPGMVWQDRDVYLQGPIWAKIPHTGGNFHPSPLMGGFGMKHPPPQILIKNTPVPADPPTAFNKDKLNSFITQYSTGQVSVEIEWELQKENSKRWNPEIQYTSNYYKSNNVEFAVNTGGVYSEPRPIGTRYLTRNL

SEQ ID NO: 956 - protein, 736 aa, synthetic construct
  source 1..736: note = Description of Artificial Sequence: Synthetic polypeptide
MAADGYLPDWLEDNLSEGIREWWALKPGAPQPKANQQHQDNARGLVLPGYKYLGPGNGLDKGEPVNAADAAALEHDKAYDQQLKAGDNPYLKYNHADAEFQERLKEDTSFGGNLGRAVFQAKKRLLEPLGLVEEAAKTAPGKKRPVEQSPQEPDSSAGIDKSGAQPAKKRLNFGQTGDTESVPDPQPIGEPPAAPSGVGSLTMASGGGAPVADNNEGADGVGSSSGNWHCDSQWLGDRVITTSTRTWALPTYNNHLYKQISNSTSGGSSNDNAYFGYSTPWGYFDFNRFHCHFSPRDWQRLINNNWGFRPKRLNFKLFNIQVKEVTDNNGVKTIANNLTSTVQVFTDSDYQLPYVLGSAHEGCLPPFPADVFMIPQYGYLTLNDGSQAVGRSSFYCLEYFPSQMLRTGNNFQFSYEFENVPFHSSYAHSQSLDRLMNPLIDQYLYYLSKTINGSGQNQQTLKFSVAGPSNMAVQGRNYIPGPSYRQQRVSTTVTQNNNSEFAWPGASSWALNGRNSLMNPGPAMASHKEGEDRFFPLSGSLIFGKQGTGRDNVDADKVMITNEEEIKTTNPVATESYGQVATNHQSAQAQAQTGWVQNQGILPGMVWQDRDVYLQGPIWAKIPHTDGNFHPSPLMGGFGMKHPPPQILIKNTPVPADPPTAFNKDKLNSFITQYSTGQVSVEIEWELQKENSKRWNPEIQYTSNYYKSNNVEFAVNTEGVYSEPRPIGTRYLTRNL

SEQ ID NO: 957 - protein, 736 aa, synthetic construct
  source 1..736: note = Description of Artificial Sequence: Synthetic polypeptide
MAADGYLPDWLEDNLSEGIREWWALKPGAPQPKANQQHQDNARGLVLPGYKYLGPGNGLDKGEPVNAADAAALEHDKAYDQQLKAGDNPYLKYNHADAEFQERLKEDTSFGGNLGRAVLQAKKRLLEPLGLVEEAAKTAPGKKRPVEQSPQEPDSSAGIGKSGAQPAKKRLNFGQTGDTESVPDPQPIGEPPAAPSGVGSLTMASGGGAPVADNNEGADGVGSSSGNWHCDSQWLGDRVITTSTRTWALPTYNNHLYKQISNSTSGGSSNDNAYFGYSTPWGYFDFNRFHCHFSPRDWQRLINNNWGFRPKRLNFKLFNIQVKEVTDNNGVKTIANNLTSTVQVFTDSDYQLPYVLGSAHEGCLPPFPADVFMIPQYGYLTLNDGSQAVGRSSFYCLEYFPSQMLRTGNNFQFSYEFENVPFHSSYAHSQSLDRLMNPLIDQYLYYLSKTINGSGQNQQTLKFSVAGSSNMAVQGRNYIPGPSYRQQRVSTTVTQNNNSEFAWPGASSWALNGRNSLMNPGPAMASHKEGEDRFFPLSGSLIFGKQGTGRDNVDADKVMITNEEEIKTTNPVATESYGQVATNHQSAQAQAQTGWVQNQGILPGMVWQDRDVYLQGPIWAKIPHTDGNFHPSPLMGGFGMKHPPPQILIKNTPVPADPPTAFNKDKLNSFITQYSTGQVSVEIEWELQKENSKRWNPEIQYTSNYYKSNNVEFAVNTEGVYSEPRPIGTRYLTRNL

SEQ ID NO: 958 - protein, 736 aa, synthetic construct
  source 1..736: note = Description of Artificial Sequence: Synthetic polypeptide
MAADGYLPDWLEDNLSEGIREWWALKPGAPQPKANQQHQDNARGLVLPGYKYLGPGNGLDKGEPVNAADAAALEHDRAYDQQLKAGDNPYLKYNHADAEFQERLKEDTSFGGNLGRAVFQAKKRLLEPLGLVEEAAKTAPGKKRPVEQSPQEPDSSAGIGKSGAQPAKKRLNFGQTGDTESVPDPQPIGEPPAAPSGVGSLTMASGGGAPVADNNEGADGVGSSSGNWHCDSQWLGDRVITTSTRTWALPTYNNHLYKQISNSTSGGSSNDNAYFGYSTPWGYFDFNRFHCHFSPRDWQRLINNNWGFRPKRLNFKLFNIQVKEVTDNNGVKTIANNLTSTVQVFTDSDYQLPYVLGSAHEGCLPPFPADVFMIPQYGYLTLNDGSQAVGRSSFYCLEYFPSQMLRTGNNFQFSYEFENVPFHSSYAHSQSLDRLMNPLIDQYLYYLSKTINGSGQNQQTLKFSVAGPSNMAVQGRNYIPGPSYRQQRVSTTVTQNNNSEFAWPGASSWALNGRNSLMNPGPAMASHKEGEDRFFPLSGSLIFGKQGTGRDNVDADKVMITNEEEIKTTNPVATESYGQVATNHQSAQAQAQTGWVQNQGILPGMVWQDRDVYLQGPIWAKIPHTDGNFHPSPLMGGFGMKHPPPQILIKNTPVPADPPTAFNKDKLNSFITQYSTGQVSVEIEWELQKKNSKRWNPEIQYTSNYYKSNNVEFAVNTEGVYSEPRPIGTRYLTRNL

SEQ ID NO: 959 - protein, 736 aa, synthetic construct
  source 1..736: note = Description of Artificial Sequence: Synthetic polypeptide
MAADGYLPDWLEDNLSEGIREWWALKPGAPQPKANQQHQDNARGLVLPGYKYLGPGNGLDKGEPVNAADAAALEHDKAYDQQLKAGDNPYLKYNHADAEFQERLKEDTSFGGNLGRAVFQAKKRLLEPLGLVEEAAKTAPGKKRPVEQSPQEPDSSAGIGKSGAQPAKKRLNFGQTGDTESVPDPQPIGEPPAAPSGVGSLTMASGGGAPVADNNEGADGVGSSSGNWHCDSQWLGDRVITTSTRTWALPTYNNHLYKQISNSTSGGSSNDNAYFGYSTPWGYFDFNRFHCHFSPRDWQRLINNNWGFRPKRLNFKLFNIQVKEVTDNNGVKTIANNLTSTVQVFTDSDYQLPYVLGSAHEGCLPPFPADVFMIPQYGYLTLNDGSQAVGRSSFYCLEYFPSQMLRTGNNFQFSYEFENVPFHSSYAHSQSLDRLMNPLIDQYLYYLSKTINGSGQNQQTLKFSVAGPSNMAVQGRNYIPGPSYRQQRVSTTVTQNNNSEFAWPGASSWALNGRNSLMNPGPAMASHKEGEDRFFPLSGSLIFGKQGTGRDNVDADKVMITNEEEIKTTNPVATESYGQVATNHQSAQARAQTGWVQNQGILPGMVWQDRDVYLQGPIWAKIPHTDGNFHPSPLMGGFGMKHPPPQILIKNTPVPADPPTAFNKDKLNSFITQYSTGQVSVEIEWELQKENSKRWNPEIQYTSNYYKSNNVEFAVNTEGVYSEPRPIGTRYLTRNL

SEQ ID NO: 960 - protein, 736 aa, synthetic construct
  source 1..736: note = Description of Artificial Sequence: Synthetic polypeptide
MAADGYLPDWLEDNLSEGIREWWALKPGAPQPKANQQHQDNARGLVLPGYKYLGPGNGLDKGEPVNAVDAAALEHDKAYDQQLKAGDNPYLKYNHADAEFQERLKEDTSFGGNLGRAVFQAKKRLLEPLGLVEEAAKTAPGKKRPVEQSPQEPDSSAGIGKSGAQPAKKRLNFGQTGDTESVPDPQPIGEPPAAPSGVGSLTMASGGGAPVADNNEGADGVGSSSGNWHCDSQWLGDRVITTSTRTWALPTYNNHLYKQISNSTSGGSSNDNAYFGYSTPWGYFDFNRFHCHFSPRDWQRLINNNWGFRPKRLNFKLFNIQVKEVTDNNGVKTIANNLTSTVQVFTDSDYQLPYVLGSAHEGCLPPFPADVFMIPQYGYLTLNDGSQAVGRSSFYCLEYFPSQMLRTGNNFQFSYEFENVPFHSSYAHSQSLDRLMNPLIDQYLYYLSKTINGSGQNQQTLKFSVAGPSNMAVQGRNYIPGPSYRQQRVSTTVTQNNNSEFAWPGASSWALNGRNSLMNPGPAMASHKEGEDRFFPLSGSLIFGKQGTGRDNVDADKVMITNEEEIKTTNPVATESYGQVATNHQSAQAQAQTGWVQNQGILPGMVWQDRDVYLQGPIWAKIPHTDGNFHPSPLMGGFGMKHPPPQILIKNTPVPADPPTAFNKDKLNSFITQYSTGQVSVEIEWELQKENSKRWNPEIQYTSNYYKSNNVEFAVNTEGVYSEPRPIGTRYLTRNL

SEQ ID NO: 961 - protein, 736 aa, synthetic construct
  source 1..736: note = Description of Artificial Sequence: Synthetic polypeptide
MAADGYLPDWLEDNLSEGIREWWALKPGAPQPKANQQHQDNARGLVLPGYKYLGPGNGLDKGEPVNAADAAALEHDKAYDQQLKAGDNPYLKYNHADAEFQERLKEDTSFGGNLGRAVFQAKKRLLEPLGLVEEAAKTAPGKKRPVEQSPREPDSSAGIGKSGAQPAKKRLNFGQTGDTESVPDPQPIGEPPAAPSGVGSLTMASGGGAPVADNNEGADGVGSSSGNWHCDSQWLGDRVITTSTRTWALPTYNNHLYKQISNSTSGGSSNDNAYFGYSTPWGYFDFNRFHCHFSPRDWQRLINNNWGFRPKRLNFKLFNIQVKEVTDNNGVKTIANNLTSTVQVFTDSDYQLPYVLGSAHEGCLPPFPADVFMIPQYGYLTLNDGSQAVGRSSFYCLEYFPSQMLRTGNNFQFSYEFENVPFHSSYAHSQSLDRLMNPLIDQYLYYLSKTINGSGQNQQTLKFSVAGPSNMAVQGRNYIPGPSYRQQRVSTTVTQNNNSEFAWPGASSWALNGRNSLMNPGPAMASHKEGEDRFFPLSGSLIFGKQGTGRDNVDADKVMITNEEEIKTTNPVATESYGQVATNHQSAQAQAQTGWVQNQGILPGMVWQDRDVYLQGPIWAKIPHTDGNFHPSPLMGGFGMKHPPPQILIKNTPVPADPPTAFNKDKLNSFITQYSTGQVSVEIEWELQKENSKRWNPEIQYTSNYYKSNNVEFAVNTEGVYSEPRPIGTRYLTRNL

SEQ ID NO: 962 - protein, 736 aa, synthetic construct
  source 1..736: note = Description of Artificial Sequence: Synthetic polypeptide
MAADGYLPDWLEDNLSEGIREWWALKPGAPQPKANQQHQDNARGLVLPGYKYLGPGNGLDKGEPVNAADAAALEHDKAYDQQLKAGDNPYLKYNHADAEFQERLKEDTSFGGNLGRAVFQAKKRLLEPLGLVEEAAKTAPGKKRPVEQSPQEPDSSAGIGKSGAQPAKKRLNFGQTGDTESVPDPQPIGEPPAAPSGVGSLTMASCGGAPVADNNEGADGVGSSSGNWHCDSQWLGDRVITTSTRTWALPTYNNHLYKQISNSTSGGSSNDNAYFGYSTPWGYFDFNRFHCHFSPRDWQRLINNNWGFRPKRLNFKLFNIQVKEVTDNNGVKTIANNLTSTVQVFTDSDYQLPYVLGSAHEGCLPPFPADVFMIPQYGYLTLNDGSQAVGRSSFYCLEYFPSQMLRTGNNFQFSYEFENVPFHSSYAHSQSLDRLMNPLIDQYLYYLSKTINGSGQNQQTLKFSVAGPSNMAVQGRNYIPGPSYRQQRVSTTVTQNNNSEFAWPGASSWALNGRNSLMNPGPAMASHKEGEDRFFPLSGSLIFGKQGTGRDNVDADKVMITNEEEIKTTNPVATESYGQVATNHQSAQAQAQTGWVQNQGILPGMVWQDRDVYLQGPIWAKIPHTDGNFHPSPLMGGFGMKHPPPQILIKNTPVPADPPTAFNKDKLNSFITQYSTGQVSVEIEWELQKENSKRWNPEIQYTSNYYKSNNVEFAVNTEGVYSEPRPIGTRYLTRNL

SEQ ID NO: 963 - protein, 736 aa, synthetic construct
  source 1..736: note = Description of Artificial Sequence: Synthetic polypeptide
MAADGYLPDWLEDNLSEGIREWWALKPGAPQPKANQQHQDNARGLVLPGYKYLGPGNGLDKGEPINAADAAALEHDKAYDQQLKAGDNPYLKYNHADAEFQERLKEDTSFGGNLGRAVFQAKKRLLEPLGLVEEAAKTAPGKKRPVEQSPQEPDSSAGIGKSGAQPAKKRLNFGQTGDTESVPDPQPIGEPPAAPSGVGSLTMASGGGAPVADNNEGADGVGSSSGNWHCDSQWLGDRVITTSTRTWALPTYNNHLYKQISNSTSGGSSNDNAYFGYSTPWGYFDFNRFHCHFSPRDWQRLINNNWGFRPKRLNFKLFNIQVKEVTDNNGVKTIANNLTSTVQVFTDSDYQLPYVLGSAHEGCLPPFPADVFMIPQYGYLTLNDGSQAVGRSSFYCLEYFPSQMLRTGNNFQFSYEFENVPFHSSYAHSQSLDRLMNPLIDQYLYYLSKTINGSGQNQQTLKFSVAGPSNMAVQGRNYIPGPSYRQQRVSTTVTQNNNSEFAWPGASSWALNGRNSLMNPGPAMASHKEGEDRFFPLSGSLIFGKQGTGRDNVDADKVMITNEEEIKTTNPVATESYGQVATNHQSAQAQAQTGWVQNQGILPGMVWQDRDVYLQGPIWAKIPHTYGNFHPSPLMGGFGMKHPPPQILIKNTPVPADPPTAFNKDKLNSFITQYSTGQVSVEIEWELQKENSKRWNPEIQYTSNYYKSNNVEFAVNTEGVYSEPRPIGTRYLTRNL

SEQ ID NO: 964 - protein, 736 aa, synthetic construct
  source 1..736: note = Description of Artificial Sequence: Synthetic polypeptide
MAADGYLPDWLEDNLSEGIREWWALKPGAPQPKANQQHQDNARGLVLPGYKYLGPGNGLDKGEPVNAADAAALEHDKAYDQQLKAGDNPYLKYNHADAEFQERLKEDTSFGGNLGRAVFQAKKRLLEPLGLVEEAAKTAPGKKRPVEQSPQEPDSSAGIGKSGAQPAKKRLNFGQTGDTESVPDPQPIGEPPAAPSGVGSLTMASGGGAPVADNNEGADGVGSSSGNWHCDSQWLGDRVITTSTRTWALPTYNNHLYKQISNSTSGGSSNDNAYFGYSTPWGYFDFNRFHCHFSPHDWQRLINNNWGFRPKRLNFKLFNIQVKEVTDNNGVKTIANNLTSTVQVFTDSDYQLPYVLGSAHEGCLPPFPADVFMIPQYGYLTLNDGSQAVGRSSFYCLEYFPSQMLRTGNNFQFSYEFENVPFHSSYAHSQSLDRLMNPLIDQYLYYLSKTINGSGQNQQTLKFNVAGPSNMAVQGRNYIPGPSYRQQRVSTTVTQNNNSEFAWPRASSWALNGRNSLMNPGPAMASHKEGEDRFFPLSGSLIFGKQGTGRDNVDADKVMITNEEEIKTTNPVATESYGQVATNHQSAQAQAQTGWVQNQGILPGMVWQDRDVYLQGPIWAKIPHTDGNFHPSPLMGGFGMKHPPPQILIKNTPVPADPPTAFNKDKLNSFITQYSTGQVSMEIEWELQKENSKRWNPEIQYTSNYYKSNNVEFAVNTEGVYSEPRPIGTRYLTRNL

SEQ ID NO: 965 - protein, 736 aa, synthetic construct
  source 1..736: note = Description of Artificial Sequence: Synthetic polypeptide
MAADGYLPDWLEDNLSEGIREWWALKPGAPQPKANQQHQDNARGLVLPGYKYLGPGNGLDKGEPVNAADAAALEHDKAYDQQLKAGDNPYLKYNHADAEFQERLKEDTSFGGNLGRAVFQAKKRLLEPLGLVEEAAKTAPGKKRPVEQSPQEPDSSAGIGKSGAQPAKKRLNFGQTGDTESVPDPQPIGEPPAAPSGVGSLTMASGGGAPVADNNEGADGVGSSSGNWHCDSQWLGDRVITTSTRTWALPTYNNHLYKQISNSTSGGSSNDNAYFGYSTPWGYFDFNRFHCHFSPRDWQRLINNNWGFRPKRLNFKLFNIQVKEVTDNNGVKTIANNLTSTVQVFTDSDYQLPYVLGSAHEGCLPPFPADVFMIPQYGYLTLNDGSQAVGRSSFYCLEYFPSQMLRTGNNFQFSYEFENVPFHSSYAHSQSLDRLMNPLIDQYLYYLSKTINGSGQNQQTLKFSVAGPSNMAVQGRNYIPGPSYRQQRVSTTVTQNNNSEFAWPRASSWALNGRNSLMNPGPAMASHKEGEDRFFPLSGSLIFGKQGTGRDNVDADKVMITNEEEIKTTNPVATESYGQVATNHQSAQAQAQTGWVQNQGILPGMVWQDRDVYLQGPIWAKIPHTDGNFHPSPLMGGFGMKHPPPQILIKNTPVPADPPTAFNKDKLNSFITQYSTGQVSVEIEWELQKENSKRWNPEIQYTSNYYKSNNVEFAVNTEGVYSEPRPIGTRYLTRNL

SEQ ID NO: 966 - protein, 736 aa, synthetic construct
  source 1..736: note = Description of Artificial Sequence: Synthetic polypeptide
MAADGYLPDWLEDNLSEGIREWWALKPGAPQPKANQQHQDNARGLVLPGYKYLGPGNGLDKGEPVNAADAAALEHDKAYDQQLKAGDNPYLKYNHADAEFQERLKEDTSFGGNLGRAVFQAKKRLLEPLGLVEEAAKTAPGKKRPVEQSPQEPDSSAGIGKSGAQPAKKRLNFGQTGDTESVPDPQPIGEPPAAPSGVGSLTMASGGGAPVADNNEGADGVGSSSGNWHCDSQWLGDRVITTSTRTWALPTYNNHLYKQISNSTSGGSSNDNAYFGYSTPWGYFDFNRFHCHFSPRDWQRLINNNWGFRPKRLNFKLFNIQVKEVTDNNGVKTIANNLTSTVQVFTDSDYQLPYVLGSAHEGCLPPFPADVFMIPQYGYLTLNDGSQAVGRSSFYCLEYFPSQMLRTGNNFQFSYEFENVPFHSSYAHSQSLDRLMNPLIDQYLYYLSKTINGSGQNQQTLKFSVAGPSNMAVQGRNYIPGPSYRQQRVSTTVTQNNNSEFAWPRASSWALNGRNSLMNPGPAMASHKEGEDRFFPLSGSLIFGKQGTGRDNVDADKVMITNEEEIKTTNPVATESYGQVATNHQSAQAQAQTGWVQNQGILPGMVWQDRDVYLQGPIWAKIPHTDGNFHPSPLMGGFGMKHPPPQILIKNTPVPADPPTAFNKDKLNSFITQYSTGQVSVEIEWERQKENSKRWNPEIQYTSNYYKSNNVEFAVNTEGVYSEPRPIGTRYLTRNL

SEQ ID NO: 967 - protein, 736 aa, synthetic construct
  source 1..736: note = Description of Artificial Sequence: Synthetic polypeptide
MAADGYLPDWLEDNLSEGIREWWALKPGAPQPKANQQHQDNARGLVLPGYKYLGPGNGLDKGEPVNAADAAALEHDKAYDQQLKAGDNPYLKYNHADAEFQERLKEDTSFGGNLGRAVFQAKKRLLEPLGLVEEAAKTAPGKKRPVEQSPQEPDSSAGIGKSGAQPAKKRLNFGQTGDTESVPDPQPIGEPPAAPSGVGSLTMASGGGAPVADNNEGADGVGSSSGNWHCDSQWLGDRVITTSTRTWALPTYNNHLYKQISNSTSGGSSNDNAYFGYSTPWGYFDFNRFHCHFSPRDWQRLINNNWGFRPKRLNFKLFNIQVKEVTDNNGVKTIANNLTSTVQVFADSDYQLPYVLGSAHEGCLPPFPADVFMIPQYGYLTLNDGSQAVGRSSFYCLEYFPSQMLRTGNNFQFSYEFENVPFHSSYAHSQSLDRLMNPLIDQYLYYLSKTINGSGQNQQTLKFSVAGPSNMAVQGRNYIPGPSYRQQRVSTTVTQNNNSEFAWPRASSWALNGRNSLMNPGPAMASHKEGEDRFFPLSGSLIFGKQGTGRDNVDADKVMITNEEEIKTTNPVATESYGQVATNHQSAQAQAQTGWVQNQGILPGMVWQDRDVYLQGPIWAKIPHTDGNFHPSPLMGGFGMKHPPPQILIKNTPVPADPPTAFNKDKLNSFITQYSTGQVSVEIEWELQKENSKRWNPEIQYTSNYYKSNNVEFAVNTEGVYSEPRPIGTRYLTRNL

SEQ ID NO: 968 - protein, 736 aa, synthetic construct
  source 1..736: note = Description of Artificial Sequence: Synthetic polypeptide
MAADGYLPDWLEDNLSEGIREWWALKPGAPQPKANQQHQDNARGLVLPGYKYLGPGNGLDKGEPVNAADAAALEHDKAYDQQLKAGDNPYLKYNHADAEFQERLKEDTSFGGNLGRAVFQAKKRLLEPLGLVEEAAKTAPGKKRPVEQSPQEPDSSAGIGKSGAQPAKKRLNFGQTGDTESVPDPQPIGEPPAAPSGVGSLTMASGGGAPVADNNEGADGVGSSSGNWHCDSQWLGDRVITTSTRTWALPTYNNHLYKQISNSTSGGSSNDNAYFGYSTPWGYFDFNRFHCHFSPRDWQRLINNNWGFRPKRLNFKLFNIQVKEVTDNNGVKTIANNLTSTVQVFTDSDYQLPYVLGSAHEGCLPPFPADVFMIPQYGYLTLNDGSQAVGRSSFYCLEYFPSQMLRTGNNFQFSYEFENVPFHSSYAHSQSLDRLMNPLIDQYLYYLSKTINGSGQNQQTLKFSVAGPSNMAVQGRNYIPGPSYRQQRVSTTVTQNNNSEIAWPRASSWALNGRNSLMNPGPAMASHKEGEDRFFPLSGSLIFGKQGTGRDNVDADKVMITNEEEIKTTNPVATESYGQVATNHQSAQAQAQTGWVQNQGILPGMVWQDRDVYLQGPIWAKIPHTDGNFHPSPLMGGFGMKHPPPQILIKNTPVPADPPTAFNKDKLNSFITQYSTGQVSVEIEWELQKENSKRWNPEIQYTSNYCKSNNVEFAVNTEGVYSEPRPIGTRYLTRNL

SEQ ID NO: 969 - protein, 736 aa, synthetic construct; identical to SEQ ID NO: 965
  source 1..736: note = Description of Artificial Sequence: Synthetic polypeptide

SEQ ID NO: 970 - DNA, 2208 bp, synthetic construct
  source 1..2208: mol_type = other DNA; note = Description of Artificial Sequence: Synthetic polynucleotide
atggctgccgatggttatcttccagattggctcgaggacaaccttagtgaaggaattcgcgagtggtgggctttgaaacctggagcccctcaacccaaggcaaatcaacaacatcaagacaacgctcgaggtcttgtgcttccgggttacaaataccttggacccggcaacggactcgacaagggggagccggtcaacgcagcagacgcggcggccctcgagcacgacaaggcctacgaccagcagctcaaggccggagacaacccgtacctcaagtacaaccacgccgacgccgagttccaggagcggctcaaagaagatacgtcttttgggggcaacctcgggcgagcagtcttccaggccaaaaagaggcttcttgaacctcttggtctggttgaggaagcggctaagacggctcctggaaagaagaggcctgtagagcagtctcctcaggaaccggactcctccgcgggtattggcaaatcgggtgcacagcccgctaaaaagagactcaatttcggtcagactggcgacacagagtcagtcccagaccctcaaccaatcggagaacctcccgcagccccctcaggtgtgggatctcttacaatggcttcaggtggtggcgcaccagtggcagacaataacgaaggtgccgatggagtgggtagttcctcgggaaattggcattgcgattcccaatggctgggggacagagtcatcaccaccagcacccgaacctgggccctgcccacctacaacaatcacctctacaagcaaatctccaacagcacatctggaggatcttcaaatgacaacgcctacttcggctacagcaccccctgggggtattttgacttcaacagattccactgccacttctcaccacgtgactggcagcgactcatcaacaacaactggggattccggcctaagcgactcaacttcaagctcttcaacattcaggtcaaagaggttacggacaacaatggagtcaagaccatcgccaataaccttaccagcacggtccaggtcttcacggactcagactatcagctcccgtacgtgctcgggtcggctcacgagggctgcctcccgccgttcccagcggacgttttcatgattcctcagtacgggtatctgacgcttaatgatggaagccaggccgtgggtcgttcgtccttttactgcctggaatatttcccgtcgcaaatgctaagaacgggtaacaacttccagttcggctacgagtttgagaacgtacctttccatagcagctacgctcacagccaaagcctggaccgactaatgaatccactcatcgaccaatacttgtactatctctcaaagactattaacggttctggacagaatcaacaaacgctaaaattcagtgtggccggacccagcaacatggctgtccagggaagaaactacatacctggacccagctaccgacaacaacgtgtctcaaccactgtgactcaaaacaacaacagcgaatttgcttggcctggagcttcttcttgggctctcaatggacgtaatagcttgatgaatcctggacctgctatggccagccacaaagaaggagaggaccgtttctttcctttgtctggatctttaatttttggcaaacaaggaactggaagagacaacgtggatgcggacaaagtcatgataaccaacgaagaagaaattaaaactactaacccggtagcaacggagtcctatggacaagtggccacaaaccaccagagtgcccaagcacaggcgcagaccggctgggttcaaaaccaaggaatacttccgggtatggtttggcaggacagagatgtgtacctgcaaggacccatttgggccaaaattcctcacacggacggcaactttcacccttctccgctgatgggagggtttggaatgaagcacccgcctcctcagatcctcatcaaaaacacacctgtacctgcggatcctccaacggccttcaacaaggacaagctgaactctttcatcacccagtattctactggccaagtcagcgtggagatcgagtgggagctgcagaaggaaaacagcaagcgctgggacccggagatccagtacacttccaactattacaagtctaataatgttgaatttgctgttaatactgaaggtgtatatagtgaaccccgccccattggcaccagatacctgactcgtaatctg

SEQ ID NO: 971 - DNA, 2208 bp, synthetic construct
  source 1..2208: mol_type = other DNA; note = Description of Artificial Sequence: Synthetic polynucleotide
atggctgccgatggttatcttccagattggctcgaggacaaccttagtgaaggaattcgcgagtggtgggctttgaaacctggagcccctcaacccaaggcaaatcaacaacatcaagacaacgctcgaggtcttgtgcttccgggttacaaataccttggacccggcaacggactcgacaagggggagccggtcaacgcagcagacgcggcggccctcgagcacgacaaggcctacgaccagcagctcaaggccggagacaacccgtacctcaagtacaaccacgccgacgccgagttccaggagcggctcaaagaagatacgtcttttgggggcaacctcgggcgagcagtcttccaggccaaaaagaggcttcttgaacctcttggtctggttgaggaagcggctaagacggctcctggaaagaagaggcctgtagagcagtctcctcaggaaccggactcctccgcgggtattggcaaatcgggtgcacagcccgctaaaaagagactcaatttcggtcagactggcgacacagagtcagtcccagaccctcaaccaatcggagaacctcccgcagccccctcaggtgtgggatctcttacaatggcttcaggtggtggcgcaccagtggcagacaataacgaaggtgccgatggagtgggtagttcctcgggaaattggcattgcgattcccaatggctgggggacagagtcatcaccaccagcacccgaacctgggccctgcccacctacaacaatcacctctacaagcaaatctccaacagcacatctggaggatcttcaaatgacaacgcctacttcggctacagcaccccctgggggtattttgacttcaacagattccactgccgcttctcaccacgtgactggcagcgactcatcaacaacaactggggattccggcctaagcgactcaacttcaagctcttcaacattcaggtcaaagaggttacggacaacaatggagtcaagaccatcgccaataaccttaccagcacggtccaggtcttcacggactcagactatcagctcccgtacgtgctcgggtcggctcacgagggctgcctcccgccgttcccagcggacgttttcatgattcctcagtacgggtatctgacgcttaatgatggaagccaggccgtgggtcgttcgtccttttactgcctggaatatttcccgtcgcaaatgctaagaacgggtaacaacttccagttcagctacgagtttgagaacgtacctttccatagcagctacgctcacagccaaagcctggaccgactaatgaatccactcatcgaccaatacttgtactatctctcaaagactattaacggttctggacagaatcaacaaacgctaaaattcagtgtggccggacccagcaacatggctgtccagggaagaaactacatacctggacccagctaccgacaacaacgtgtctcaaccactgtgactcaaaacaacaacagcgaatttgcttggcctggagcttcttcttgggctctcaatggacgtaatagcttgatgaatcctggacctgctatggccagccacaaagaaggagaggaccgtttctttcctttgtctggatctttaatttttggcaaacaaggaactggaagagacaacgtggatgcggacaaagtcatgataaccaacgaagaagaaattaaaactactaacccggtagcaacggagtcctatggacaagtggccacaaaccaccagagtgcccaagcacaggcgcagaccggctgggttcaaaaccaaggaatacttccgggtatggtttggcaggacagagatgtgtacctgcaaggacccatttgggccaaaattcctcacacggacggcaactttcacccttctccgctgatgggagggtttggaatgaagcacccgcctcctcagatcctcatcaaaaacgcccctgtacctgcggatcctccaacggccttcaacaaggacaagctgaactctttcatcacccagtattctactggccaagtcagcgtggagatcgagtgggagctgcagaaggaaaacagcaagcgctggaacccggagatccagtacacttccaactattacaagtctaataatgttgaatttgctgttaatactgaaggtgtatatagtgaaccccgccccattggcaccagatacctgactcgtaatctg

SEQ ID NO: 972 - DNA, 2208 bp, synthetic construct
  source 1..2208: mol_type = other DNA; note = Description of Artificial Sequence: Synthetic polynucleotide
atggctgccgatggttatcttccagattggctcgaggacaaccttagtgaaggaattcgcgagtggtgggctttgaaacctggagcccctcaacccaaggcaaatcaacaacatcaagacaacgctcgaggtcttgtgcttccgggttacaaataccttggacccggcaacggactcgacaagggggagccggtcagcgcagcagacgcggcggccctcgagcacgacaaggcctacgaccagcagctcaaggccggagacaacccgtacctcaagtacaaccacgccgacgccgagttccaggagcggctcaaagaagatacgtcttttgggggcaacctcgggcgagcagtcttccaggccaaaaagaggcttcttgaacctcttggtctggttgaggaagcggctaagacggctcctggaaagaagaggcctgtagagcagtctcctcaggaaccggactcctccgcgggtattggcaaatcgggtgcacagcccgctaaaaagagactcaatttcggtcagactggcgacacagagtcagtcccagaccctcaaccaatcggagaacctcccgcagccccctcaggtgtgggatctcttacaatggcttcaggtggtggcgcaccagtggcagacaataacgaaggtgccgatggagtgggtagttcctcgggaaattggcattgcgattcccaatggctgggggacagagtcatcaccaccagcacccgaacctgggccctgcccacctacaacaatcacctctacaagcaaatctccaacagcacatctggaggatcttcaaatgacaacgcctacttcggctacagcaccccctgggggtattttgacttcaacagattccactgccacttctcaccgcgtgactggcagcgactcatcaacaacaactggggattccggcctaagcgactcaacttcaagctcttcaacattcaggtcaaagaggttacggacaacaatggagtcaagaccatcgccaataaccttaccagcacggtccaggtcttcacggactcagactatcagctcccgtacgtgctcgggtcggctcacgagggctgcctcccgccgttcccagcggacgttttcatgattcctcagtacgggtatctgacgcttaatgatggaagccaggccgtgggtcgttcgtccttttactgcctggaatatttcccgtcgcaaatgctaagaacgggtaacaacttccagttcagctacgagtttgagaacgtacctttccatagcagctacgctcacagccaaagcctggaccgactaatgaatccactcatcgaccaatacttgtactatctctcaaagactattaacggttctggacagaatcaacaaacgctaaaattcagtgtggccggacccagcaacatggctgtccagggaagaaactacatacctggacccagctaccgacaacaacgtgtctcaaccactgtgactcaaaacaacaacagcgaatttgcttggcctggagcttcttcttgggctctcaatggacgtaatagcttgatgaatcctggacctgctatggccagccacaaagaaggagaggaccgtttctttcctttgtctggatctttaatttttggcaaacaaggaactggaagagacaacgtggatgcggacaaagtcatgataaccaacgaagaagaaattaaaactactaacccggtagcaacggagtcctatggacaagtggccacaaaccaccagagtgcccaagcacaggcgcagaccggctgggttcaaaaccaaggaatacttccgggtatggtttggcaggacagagatgtgtacctgcaaggacccatttgggccaaaattcctcacacggacggcaactttcacccttctccgctgatgggagggtttggaatgaagcacccgcctcctcagatcctcatcaaaaacacacctgtacctgcggatcctccaacggccttcaacaaggacaagctgaactctttcatcacccagtattctactggccaagtcagcgtggagatcgagtgggagctgcagaaggaaaacagcaagcgctggaacccggagatccagtacacttccaactattacaagtctaataatgttgaatttgctgttaatactgaaggtgtatatagtgaaccccgccccattggcaccagatacctgactcgtaatctg

SEQ ID NO: 973 - DNA, 2208 bp, synthetic construct
  source 1..2208: mol_type = other DNA; note = Description of Artificial Sequence: Synthetic polynucleotide
atggctgccgatggttatcttccagattggctcgaggacaaccttagtgaaggaattcgcgagtggtgggctttgaaacctggagcccctcaacccaaggcaaatcaacaacatcaagacaacgctcgaggtcttgtgcttccgggttacaaataccttggacccggcaacggactcgacaagggggagccggtcaacgcagcagacgcggcggccctcgagcacgacaaggcctacgaccagcagctcaaggccggagacaacccgtacctcaagtacaaccacgccgacgccgagttccaggagcggctcaaagaagatacgtcttttgggggcaacctcgggcgagcagtcttccaggccaaaaagaggcttcttgaacctcttggtctggttgaggaagcggctaagacggctcctggaaagaagaggcctgtagagcagtctcctcaggaaccggactcctccgcgggtattggcaaatcgggtgcacagcccgctaaaaagagactcaatttcggtcagactggcgacacagagtcagtcccagaccctcaaccaatcggagaacctcccgcagccccctcaggtgtgggatctcttacaatggcttcaggtggtggcgcaccagtggcagacaataacgaaggtgccgatggagtgggtagttcctcgggaaattggcattgcgattcccaatggctgggggacagagtcatcaccaccagcacccgaacctgggccctgcccacctacaacaatcacctctacaagcaaatctccaacagcacatctggaggatcttcaaatgacaacgcctacttcggctacagcaccccctgggggtattttgacttcaacagattccactgccacttctcaccacgtgactggcagcgactcatcaacaacaactggggattccggcctaagcgactcaacttcaagctcttcaacattcaggtcaaagaggttacggacaacaatggagtcaagaccatcgccaataaccttaccagcacggtccaggtcttcacggactcagactatcagctcccgtacgtgctcgggtcggctcacgagggctgcctcccgccgttcccagcggacgttttcatgattcctcagtacgggtatctgacgcttaatgatggaagccaggccgtgggtcgttcgtccttttactgcctggaatatttcccgtcgcaaatgctaagaacgggtaacaacttccagttcagctacgagtttgagaacgtacctttccatagcagctacgctcacagccaaagcctggaccgactaatgaatccactcatcgaccaatacttgtactatctctcaaagactattaacggttctggacagaatcaacaaacgctaaaattcagtgtggccggacccagcaacacggctgtccagggaagaaactacatacctggacccagctaccgacaacaacgtgtctcaaccactgtgactcaaaacaacaacagcgaatttgcttggcctggagcttcttcttgggctctcaatggacgtaatagcttgatgaatcctggacctgctatggccagccacaaagaaggagaggaccgtttctttcctttgtctggatctttaatttttggcaaacaaggaactggaagagacaacgtggatgcggacaaagtcatgataaccaacgaagaagaaattaaaactactaacccggtagcaacggagtcctatggacaagtggccacaaaccaccagagtgcccaagcacaggcgcagaccggctgggttcaaaaccaaggaatacttccgggtatggtttggcaggacagagatgtgtacctgcaaggacccatttgggccaaaattcctcacacggacggcaactttcacccttctccgctgatgggagggtttggaatgaagcacccgcctcctcagatcctcatcaaaaacacacctgtacctgcggatcctccaacggccttcaacaaggacaagctgaactctttcatcacccagtattctactggccaagtcagcgtggagatcgagtgggagctgcagaaggaaaacagcaagcgctggaacccggagatccagtacacttccaactattacaagtctaataatgttgaatttgctgttaatactgaaggtgtatatagtgaaccccgccccattggcaccagatacctgactcgtaatctg

SEQ ID NO: 974 - DNA, 2208 bp, synthetic construct
  source 1..2208: mol_type = other DNA; note = Description of Artificial Sequence: Synthetic polynucleotide
atggctgccgatggttatcttccagattggctcgaggacaaccttagtgaaggaattcgcgagtggtgggctttgaaacctggagcccctcaacccaaggcaaatcaacaacatcaagacaacgctcgaggtcttgtgcttccgggttacaaataccttggacccggcaacggactcgacaagggggagccggtcaacgcagcagacgcggcggccctcgagcacgacaaggcctacgaccagcagctcaaggccggagacaacccgtacctcaagtacaaccacgccgacgccgagttccaggagcggctcaaagaagatacgtcttttgggggcaacctcgggcgagcagtcttccaggccaaaaagaggcttcttgaacctcttggtctggttgaggaagcggctaagacggctcctggaaagaagaggcctgtagagcagtctcctcaggaaccggactcctccgcgggtattggcaaatcgggtgcacagcccgctaaaaagagactcaatttcggtcagactggcgacacagagtcagtcccagaccctcaaccaatcggagaacctcccgcagccccctcaggtgtgggatctcttacaatggcttcaggtggtggcgcaccagtggcagacaataacgaaggtgccgatggagtgggtagttcctcgggaaattggcattgcgattcccaatggctgggggacagagtcatcaccaccagcacccgaacctgggccctgcccacctacaacaatcacctctacaagcaaatctccaacagcacatctggaggatcttcaaatgacaacgcctacttcggctacagcaccccctgggggtattttgacttcaacagattccactgccacttctcaccacgtgactggcagcgactcatcaacaacaactggggattccggcctaagcggctcaacttcaagctcttcaacattcaggtcaaagaggttacggacaacaatggagtcaagaccatcgccaataaccttaccagcacggtccaggtcttcacggactcagactatcagctcccgtacgtgctcgggtcggctcacgagggctgcctcccgccgttcccagcggacgttttcatgattcctcagtacgggtatctgacgcttaatgatggaagccaggccgtgggtcgttcgtccttttactgcctggaatatttcccgtcgcaaatgctaagaacgggtagcaacttccagttcagctacgagtttgagaacgtacctttccatagcagctacgctcacagccaaagcctggaccgactaatgaatccactcatcgaccaatacttgtactatctctcaaagactattaacggttctggacagaatcaacaaacgctaaaattcagtgtggccggacccagcaacatggctgtccagggaagaaactacatacctggacccagctaccgacaacaacgtgtctcaaccactgtgactcaaaacaacaacagcgaatttgcttggcctggagcttcttcttgggctctcaatggacgtaatagcttgatgaatcctggacctgctatggccagccacaaagaaggagaggaccgtttctttcctttgtctggatctttaatttttggcaaacaaggaactggaagagacaacgtggatgcggacaaagtcatgataaccaacgaagaagaaattaaaactactaacccggcagcaacggagtcctatggacaagtggccacaaaccaccagagtgcccaagcacaggcgcagaccggctgggttcaaaaccaaggaatacttccgggtatggtttggcaggacagagatgtgtacctgcaaggacccatttgggccaaaattcctcacacggacggcaactttcacccttctccgctgatgggagggtttggaatgaagcacccgcctcctcagatcctcatcaaaaacacacctgtacctgcggatcctccaacggccttcaacaaggacaagctgaactctttcatcacccagtattctactggccaagtcagcgtggagatcgagtgggagctgcagaaggaaaacagcaagcgctggaacccggagatccagcacacttccaactattacaagtctaataatgttgaatttgctgttaatactgaaggtgtatatagtgaaccccgccccattggcaccagatacctgactcgtaatctg

SEQ ID NO: 975 - DNA, 2208 bp, synthetic construct
  source 1..2208: mol_type = other DNA; note = Description of Artificial Sequence: Synthetic polynucleotide
atggctgccgatggttatcttccagattggctcgaggacaaccttagtgaaggaattcgcgagtggtgggctttgaaacctggagcccctcaacccaaggcaaatcaacaacatcaagacaacgctcgaggtcttgtgcttccgggttacaaataccttggacccggcaacggactcgacaagggggagccggtcaacgcagcagacgcggcggccctcgagcacgacaaggcctacgaccagcagctcaaggccggagacaacccgtacctcaagtacaaccacgccgacgccgagttccaggagcggctcaaagaagatacgtcttttgggggcaacctcgggcgagcagtcttccaggccaaaaagaggcttcttgaacctcttggtctggttgaggaagcggctaagacggctcctggaaagaagaggcctgtagagcagtctcctcaggaaccggactcctccgcgggtattggcaaatcgggtgcacagcccgctaaaaagagactcaatttcggtcagactggcgacacagagtcagtcccagaccctcaaccaatcggagaacctcccgcagccccctcaggtgtgggatctcttacaatggcttcaggtggtggcgcaccagtggcagacaataacgaaggtgccgatggagtgggtagttcctcgggaaattggcattgcgattcccaatggctgggggacagagtcatcaccaccagcacccgaacctgggccctgcccacctacaacaatcacctctacaagcaaatctccaacagcacatctggaggatcttcaaatgacaacgcctacttcggctacagcaccccctgggggtattttgacttcaacagattccactgccacttctcaccacgtgactggcagcgactcatcaacaacaactggggattccggcctaagcgactcaacttcaggctcttcaacattcaggtcaaagaggttacggacaacaatggagtcaagaccatcgccaataaccttaccagcacggtccaggtcttcacggactcagactatcagctcccgtacgtgctcgggtcggctcacgagggctgcctcccgccgttcccagcggacgttttcatgattcctcagtacgggtatctgacgcttaatgatggaagccaggccgtgggtcgttcgtccttttactgcctggaatatttcccgtcgcaaatgctaagaacgggtaacaacttccagttcagctacgagtttgagaacgtacctttccatagcagctacgctcacagccaaagcctggaccgactaatgaatccactcatcgaccaatacttgtactatctctcaaagactattaacggttctggacagaatcaacaaacgctaaaattcagtgtggccggacccagcaacatggctgtccagggaagaaactacatacctggacccagctaccgacaacaacgtgtctcaaccactgtgactcaaaacaacaacagcgaatttgcttggcctggagcttcttcttgggctctcaatggacgtaatagcttgatgaatcctggacctgctatggccagccacaaagaaggagaggaccgtttctttcctttgtctggatctttaatttttggcaaacaaggaactggaagagacaacgtggatgcggacaaagtcatgataaccaacgaagaagaaattaaaactactaacccggtagcaacggagtcctatggacaagtggccacaaaccaccagagtgcccaagcacaggcgcagaccggctgggttcaaagccaaggaatacttccgggtatggtttggcaggacagagatgtgtacctgcaaggacccatttgggccaaaattcctcacacggacggcaactttcacccttctccgctgatgggagggtttggaatgaagcacccgcctccccagatcctcatcaaaaacacacctgtacctgcggatcctccaacggccttcaacaaggacaagctgaactctttcatcacccagtattctactggccaagtcagcgtggagatcgagtgggagctgcagaaggaaaacagcaagcgctggaacccggagatccagtacacttccaactattacaagtctaataatgttgaatttgctgttaatactgaaggtgtatatagtgaaccccgccccattggcaccagatacctgactcgtaatctg

SEQ ID NO: 976 - DNA, 2205 bp, synthetic construct
  source 1..2205: mol_type = other DNA; note = Description of Artificial Sequence: Synthetic polynucleotide
atggctgccgatggttatcttccagattggctcgaggacaaccttagtgaaggaattcgcgagtggtgggctttgaaacctggagcccctcaacccaaggcaaatcaacaacatcaagacaacgcccgaggtcttgtgcttccgggttacaaataccttggacccggcaacggactcgacaagggggagccggtcaacgcagcagacgcggcggccctcgagcacgacaaggcctacgaccagcagctcaaggccggagacaacccgtacctcaagtacaaccacgccgacgccgagttccaggagcggctcaaagaagatacgtcttttgggggcaacctcgggcgagcagtcttccaggccaaaaagaggcttcttgaacctcttggtctggttgaggaagcggctaagacggctcctggaaagaagaggcctgtagagcagtctcctcaggaaccggactcctccgcgggtattggcaaatcgggtgcacagcccgctaaaaagagactcaatttcggtcagactggcgacacagagtcagtcccagaccctcaaccaatcggagaacctcccgcagccccctcaggtgtgggatctcttacaatggcttcaggtggtggcgcaccagtggcagacaataacgaaggtgccgatggagtgggtagttcctcgggaaattggcattgcgattcccaatggctgggggacagagtcatcaccaccagcacccgaacctgggccctgcccacctacaacaatcacctctacaagcaaatctccaacagcacatctggaggatcttcaaatgacaacgcctacttcggctacagcaccccctggaggtattttgacttcaacagattccactgccacttctcaccacgtgactggcagcgactcatcaacaactggggattccggcctaagcgactcaacttcaagctcttcaacattcaggtcaaagaggttacggacaacaatggagtcaagaccatcgccaataaccttaccagcacggtccaggccttcacggactcagactatcagctcccgtacgtgctcgggtcggctcacgagggctgcctcccgccgttcccagcggacgttttcatgattcctcagtacgggtatctgacgcttaatgatggaagccaggccgtgggtcgttcgtccttttactgcctggaatatttcccgtcgcaaatgctaagaacgggtaacaacttccagttcagctacgagtttgagaacgtacctttccatagcagctacgctcacagccaaagcctggaccgactaatgaatccactcatcgaccaatacttgtactatctctcaaagactattaacggttctggacagaatcaacaaacgctaaaattcagtgtggccggacccagcaacatggctgtccagggaagaaactacatacctggacccagctaccgacaacaacgtgtctcaaccactgtgactcaaaacaacaacagcgaatttgcttggcctggagcttcttcttgggctctcaatggacgtaatagcttgatgaatcctggacctgctatggccagccacaaagaaggagaggaccgtttctttcctttgtctggatctttaatttttggcaaacaaggaactggaagagacaacgtggatgcggacaaagtcatgataaccaacgaagaagaaattaaaactactaacccggtagcaacggagtcctatggacaagtggccacaaaccaccagagtgcccaagcacaggcgcagaccggctgggttcaaaaccaaggaatacttccgggtatggtttggcaggacagagatgtgtacctgcaaggacccatttgggccaaaattcctcacacggacggcaactttcacccttctccgctgatgggagggtttggaatgaagcacccgcctcctcagatcctcatcaaaaacacacctgtacctgcggatcctccaacggccttcaacaaggacgagctgaactctttcatcacccagtattctactggccaagtcagcgtggagatcgagtgggagctgcagaaggaaaacagcaagcgctggaacccggagatccagtacacttccaactattacaagtctaataatgttgaatttgctgttaatactgaaggtgtatatagtgaaccccgccccattggcaccagatacctgactcgtaatctg

SEQ ID NO: 977 - DNA, 2205 bp, synthetic construct
  source 1..2205: mol_type = other DNA; note = Description of Artificial Sequence: Synthetic polynucleotide
atggctgccgatggttatcttccagattggctcgaggacaaccttagtgaaggaattcgcgagtggtgggctttgaaacctggagcccctcaacccaaggcaaatcaacaacatcaagacaacgctcgaggtcttgtgcttccgggttacaaataccttggacccggcaacggactcgacaagggggagccggtcaacgcagcagacgcggcggccctcgagcacgacaaggcctacgaccagcagctcaaggccggagacaacccgtacctcaagtacaaccacgccgacgccgagttccaggagcggctcaaagaagatacgtcttttgggggcaacctcgggcgagcagtcttccaggacaaaaagaggcttcttgaacctcttggtctggttgaggaagcggctaagacggctcctggaaagaagaggcctgtagagcagtctcctcaggaaccggactcctccgcgggtattggcaaatcgggtgcacagcccgctaaaaagagactcaatttcggtcagactggcgacacagagtcagtcccagaccctcaaccaatcggagaacctcccgcagccccctcaggtgtgggatctcttacaatggcttcaggtggtggcgcaccagtggcagacaataacgaaggtgccgatggagtgggtagttcctcgggaaattggcattgcgattcccaatggctgggggacagagtcatcaccaccagcacccgaacctgggccctgcccacctacaacaatcacctctacaagcaaatctccaacagcacatctggaggatcttcaaatgacaacgcctacttcggctacagcaccccctgggggtattttgacttcaacagattccactgccacttctcaccacgtgactggcagcgactcatcaacaactggggattccggcctaagcgactcaacttcaagctcttcaacattcaggtcaaagaggttacggacaacaatggagtcaagaccatcgccaataaccttaccagcacggtccaggtcttcacggactcagactatcagctcccgtacgtgctcgggtcggctcacgagggctgcctcccgccgttcccagcggacgttttcatgattcctcagtacgggtatctgacgcttaatgatggaagccaggccgtgggtcgttcgtccttttactgcctggaatatttcccgtcgcaaatgctaagaacgggtaacaacttccaattcagctacgagtttgagaacgtacctttccatagcagctacgctcacagccaaagcctggaccgactaatgaatccactcatcgaccaatacttgtactatctctcaaagactattaacggttctggacagaatcaacaaacgctaaaattcagtgtggccggacccagcaacatggctgtccagggaagaaactacatacctggacccagctaccgacaacaacgtgtctcaaccactgtgactcaaaacaacaacagcgaatttgcttggcctggagcttcttcttgggctctcaatggacgtaatagcttgatgaatcctggacctgctatggccagccacaaagaaggagaggaccgtttctttcctttgtctggatctttaatttttggcaaacaaggaactggaagagacaacgtggatgcggacaaagtcatgataaccaacgaagaagaaattaaaactactaacccggtagcaacggagtcctatggacaagtggccacaaaccaccagagtgcccaagcacaggcgcagaccggctgggttcaaaaccaaggaatacttccgggtatggtttggcaggacagagatgtgtacctgcaaggacccatttgggccaaaattcctcacacggacggcaactttcacccttctccgctgatgggagggtttggaatgaagcacccgcctcctcagatcctcatcaaaaacacacctgtacctgcggatcctccaacggccttcaacaaggacaagctgaactctttcatcacccagtattctactggccaagtcagcgtggagatcgagtgggagctgcagaaggaaaacagcaagcgctggaacccggagatccagtacacttccaactattacaagtctaataatgttgaatttgctgttaatactgaaggtgtatatagtgaaccccgccccattggcaccagatacctgactcgtaatctg

SEQ ID NO: 978 - DNA, 2208 bp, synthetic construct
  source 1..2208: mol_type = other DNA; note = Description of Artificial Sequence: Synthetic polynucleotide
atggctgccgatggttatcttccagattggctcgaggacaaccttagtgaaggaattcgcgagtggtgggctttgaaacctggagcccctcaacccaaggcaaatcaacaacatcaagacaacgctcgaggtcttgtgcttccgggttacaaataccttggacccggcaacggactcgacaagggggagccggtcaacgcagcagacgcggcggccctcgagcacgacaaggcctacgaccagcagctcaaggccggagacaacccgtacctcaagtacaaccacgccgacgccgagttccaggagcggctcaaagaagatacgtcttttgggggcaacctcgggcgagcagtcttccaggccaaaaagaggcttcttgaacctcttggtctggttgaggaagcggctaagacggctcctggaaagaagaggcctgtagagcagtctcctcaggaaccggactcctccgcgggtattggcaaatcgggtgcacagcccgctaaaaagagactcaatttcggtcagactggcgacacagagtcagtcccagaccctcaaccaatcggagaacctcccgcagccccctcaggtgtgggatctcttacaatggcttcaggtggtggcgcaccagtggcagacaataacgaaggtgccgatggagtgggtagttcctcgggaaattggcattgcgattcccaatggctgggggacagagccatcaccaccagcacccgaacctgggccctgcccacctacaacaatcacctctacaagcaaatctccaacagcacatctggaggatcttcaaatgacaacgcctacttcggctacagcaccccctgggggtattttgacttcaacagattccactgccacttctcaccacgtgactggcagcggctcatcaacaacaactggggattccggcctaagcgactcaacttcaagctcttcaacattcaggtcaaagaggttacggacaacaatggagtcaagaccatcgccaataaccttaccagcacggtccaggtcttcacggactcagactatcagctcccgtacgtgctcgggtcggctcacgagggctgcctcccgccgttcccagcggacgttttcatgattcctcagtacgggtatctgacgcttaatgatggaagccaggccgtgggtcgttcgtccttttactgcctggaatatttcccgtcgcaaatgctaagaacgggtaacaacttccagttcagctacgagtttgagaacgtacctttccatagcagctacgctcacagccaaagcctggaccgactaatgaatccactcatcgaccaatacttgtactatctctcaaagactattaacggttctggacagaatcaacaaacgctaaaattcagtgtggccggacccagcaacatggctgtccagggaagaaactacatacctggacccagctaccgacaacaacgtgtctcaaccactgtgactcaaaacaacaacagcgaatttgcttggcctggagcttcttcttgggctctcaatggacgtaatagcttgatgaatcctggacctgctatggccagccacaaagaaggagaggaccgtttctttcctttgtctggatctttaatttttggcaaacaaggaactggaagagacaacgtggatgcggacaaagtcatgacaaccaacgaagaagaaattaaaactactaacccggtagcaacggagtcctatggacaagtggccacaaaccaccagagtgcccaagcacaggcgcagaccggctgggttcaaaaccaaggaatacttccgggtatggtttggcaggacagagatgtgtacctgcaaggacccatttgggccaaaattcctcacacggacggcaactttcacccttctccgctgatgggagggtttggaatgaagcacccgcctcctcagatcctcatcaaaaacacacctgtacctgcggatcctccaacggccttcaacaaggacaagctgaactctttcatcacccagtattctactggccaagtcagcgtggagatcgagtgggagctgcagaaggaaaacagcaagcgctggaacccggagatccagtacacttccaactattacaagtctaataatgttgaatttgctgttaatactgaaggtgtatatagtgaaccccgccccattggcaccagatacctgactcgtaatctg

SEQ ID NO: 979 - DNA, 2208 bp, synthetic construct
  source 1..2208: mol_type = other DNA; note = Description of Artificial Sequence: Synthetic polynucleotide
atggctgccgatggttatcttccagattggctcgaggacaaccttagtgaaggaattcgcgagtggtgggctttgaaacctggagcccctcaacccaaggcaaatcaacaacatcaagacaacgctcgaggtcttgtgcttccgggttacaaataccttggacccggcaacggactcgacaagggggagccggtcaatgcagcagacgcggcggccctcgagcacgacaaggcctacgaccagcagctcaaggccggagacaacccgtacctcaagtacaaccacgccgacgccgagttccaggagcggctcaaagaagatacgtcttttgggggcaacctcgggcgagcagtcttccagaccaaaaagaggcttcttgaacctcttggtctggttgaggaagcggctaagacggctcctggaaagaagaggcctgtagagcagtctcctcaggaaccgggctcctccgcgggtattggcaaatcgggtgcacagcccgctaaaaagagactcaatttcggtcagactggcgacacagagtcagtcccagaccctcaaccaatcggagaacctcccgcagccccctcaggtgtgggatctcttacaatggcttcaggtggtggcgcaccagtggcagacaataacgaaggtgccgatggagtgggtagttcctcgggaaattggcattgcgattcccaatggctgggggacagagtcatcaccaccagcacccgaacctgggccctgcccacctacaacaatcacctctacaagcaaatctccaacagcacatctggaggatcttcaaatgacaacgcctacttcggctacagcaccccctgggggtattttgacttcaacagattccactgccacttctcaccacgtgactggcagcgactcatcaacaacaactggggattccggcctaagcgactcaacttcaagctcttcaacattcaggtcaaagaggttacggacaacaatggagtcaagaccatcgccaataaccttaccagcacggtccaggtcttcacggactcagactatcagctcccgtacgtgctcgggtcggctcacgagggctgcctcccgccgttcccagcggacgttttcatgattcctcagtacgggtatctgacgcttaatgatggaagccaggccgtgggtcgttcgtccttttactgcctggaatatttcccgtcgcaaatgctaagaacgggtaacaacttccagttcagctacgagtttgagaacgtacctttccatagcagctacgctcacagccaaagcctggaccgactaatgaatccactcatcgaccaatacttgcactatctctcaaagactattaacggttctggacagaatcaacaaacgctaaaattcagtgtggccggacccagcaacatggctgtccagggaagaaactacatacctggacccagctaccgacaacaacgtgtctcaaccactgtgactcaaaacaacaacagcgaatttgcttggcctggagcttcttcttgggctctcaatggacgtaatagcttgatgaatcctggacctgctatggccagccacaaagaaggagaggaccgtttctttcctttgtctggatctttaatttttggcaaacaaggaactggaagagacaacgtggatgcggacaaagtcatgataaccaacgaagaagaaattaaaactactaacccggtagcaacggagtcctatggacaagtggccacaaaccaccagagtgcccaagcacaggcgcagaccggctgggttcaaaaccaaggaatacttccgggtatggtttggcaggacagagatgtgtacctgcaaggacccatttgggccaaaattcctcacacggacggcaactttcacccttctccgctgatgggagggtttggaatgaagcacccgcctcctcagatcctcatcaaaaacacacctgtacctgcggatcctccaacggccttcaacaaggacaagctgaactctttcatcacccagtattctactggccaagtcagcgtggagatcgagtgggagctgcagaaggaaaacagcaagcgctggaacccggagatccagtacacttccaactattacaagtctaataatgttgaatttgctgttaatactgaaggtgtatatagtgaaccccgccccattggcaccagatacctgactcgtaatctg

SEQ ID NO: 980 - DNA, 2208 bp, synthetic construct
  source 1..2208: mol_type = other DNA; note = Description of Artificial Sequence: Synthetic polynucleotide
atggctgccgatggttattttccagattggctcgaggacaaccttagtgaaggaattcgcgagtggtgggctttgaaacctggagcccctcaacccaaggcaaatcaacaacatcaagacaacgctcgaggtcttgtgcttccgggttacaaataccttggacccggcaacggactcgacaagggggagccggtcaacgcagcagacgcggcggccctcgagcacgacaaggcctacgaccagcagctcaaggccggagacaacccgtacctcaagtacaaccacgccgacgccgagttccaggagcggctcaaagaagatacgtcttttgggggcaacctcgggcgagcagtcttccaggccaaaaagaggcttcttgaacctcttggtctggttgaggaagcggctaagacggctcctggaaagaagaggcctgtagagcagtctcctcaggaaccggactcctccgcgggtattggcaaatcgggtgcacagcccgctaaaaagagactcaatttcggtcagactggcgacacagagtcagtcccagaccctcaaccaatcggagaatctcccgcagccccctcaggtgtgggatctcttacaatggcttcaggtggtggcgcaccagtggcagacaataacgaaggtgccgatggagtgggtagttcctcgggaaattggcattgcgattcccaatggctgggggacagagtcatcaccaccagcacccgaacctgggccctgcccacctacaacaatcacctctacaagcaaatctccaacagcacatctggaggatcttcaaatgacaacgcctacttcggctacagcaccccctgggggtattttgacttcaacagattccactgccacttctcaccacgtgactggcagcgactcatcaacaacaactggggattccggcctaagcgactcaacttcaagctcttcaacattcaggtcaaagaggttacggacaacaatggagtcaagaccatcgccaataaccttaccagcacggtccaggtcttcacggactcagactatcagctcccgtacgtgctcgggtcggctcacgagggctgcctcccgccgttcccagcggacgttttcatgattcctcagtacgggtatctgacgcttaatgatggaagccaggccgtgggtcgttcgtccttttactgcctggaatatctcccgtcgcaaatgctaagaacgggtaacaacttccagttcagctacgagtttgagaacgtacctttccatagcagctacgctcacagccaaagcctggaccgactaatgaatccactcatcgaccaatacttgcactatctctcaaagactattaacggttctggacagaatcaacaaacgctaaaattcagtgtggccggacccagcaacatggctgtccagggaagaaactacatacctggacccagctaccgacaacaacgtgtctcaaccactgtgactcaaaacaacaacagcgaatttgcttggcctggagcttcttcttgggctctcaatggacgtaatagcttgatgaatcctggacctgctgtggccagccacaaagaaggagaggaccgtttctttcctttgtctggatctttaatttttggcaaacaaggaactggaagagacaacgtggatgcggacaaagtcatgataaccaacgaagaagaaattaaaactactaacccggtagcaacggagtcctatggacaagtggccacaaaccaccagagtgcccaagcacaggcgcagaccggctgggttcaaaaccaaggaatacttccgggtatggtttggcaggacagagatgtgtacctgcaaggacccatttgggccaaaattcctcacacggacggcaactttcacccttctccgctgatgggagggtttggaatgaagcacccgcctcctcagatcctcatcaaaaacacacctgtacctgcggatcctccaacggccttcaacaaggacaagctgaactctttcatcacccagtattctactggccaagtcagcgtggagatcgagtgggagctgcagaaggaaaacagcaagcgctggaacccggagatccagtacacttccaactattacaagtctaataatgttgaatttgctgttaatactgaaggtgtatatagtgaaccccgccccattggcaccagatacctgactcgtaatctg

SEQ ID NO: 981 - DNA, 2208 bp, synthetic construct
  source 1..2208: mol_type = other DNA; note = Description of Artificial Sequence: Synthetic polynucleotide
atggctgccgatggttatcttccagattggctcgaggacaaccttagtgaaggaattcgcgagtggtgggctttgaaacctggagcccctcaacccaaggcaaatcaacaacatcaagacaacgctcgaggtcttgtgcttccgggttacaaataccttggacccggcaacggactcgacaagggggagccggtcaacgcagcagacgcggcggccctcgagcacgacaaggcctacgaccagcagctcaaggccggagacaacccgtacctcaagtacaaccacgccgacgccgagttccaggagcggctcaaagaagatacgtcttttgggggcaacctcgggcgagcagtcttccaggccaaaaagaggcttcttgaacctcttggtccggttgaggaagcggctaagacggctcctggaaagaagaggcctgtagagcagtctcctcaggaaccggactcctccgcgggtattggcaaatcgggtgcacagcccgctaaaaagagactcaatttcggtcagactggcgacacagagtcagtcccagaccctcaaccaatcggagaacctcccgcagccccctcaggtgtgggatctcttacaatggcttcaggtggtggcgcaccagtggcagacaataacgaaggtgccgatggagtgggtagttcctcgggaaattggcattgcgattcccaatggctgggggacagagtcatcaccaccagcacccgaacctgggccctgcccacctacaacaatcacctctacaagcaaatctccaacagcacatctggaggatcttcaaatgacaacgcctacttcggctacagcaccccctgggggtattttgacttcaacagattccactgccacttctcaccacgtgactggcagcgactcatcaacaacaactggggattccggcctaagcgactcaacttcaagctcttcaacattcaggtcaaagaggttacggacaacaatggagtcaagaccatcgccaataaccttaccagcacggtccaggtcttcacggactcagactatcagctcccgtacgtgctcgggtcggctcacgagggctgcctcccgccgttcccagcggacgttttcatgattcctcagtacgggtatctgacgcttaatgatggaagccaggccgtgggtcgttcgtccttttactgcctggaatatttcccgtcgcaaatgctaagaacgggtaacaacttccagttcagctacgagtttgagaacgtacctttccatagcagctacgctcacagccaaagcctggaccgactaatgaatccactcatcgaccaatacttgtactatctctcaaagactattaacggttctggacagaatcaacaaacgctaaaattcagtgtggccggacccagcaacatggctgtccagggaagaaactacatacctggacccagctaccgacaacaacgtgtctcaaccactgtgactcaaaacaacaacagcgaatttgcttggcctggagcttcttcttgggctctcaatggacgtaatagcttgatgaatcctggacctgctatggccagccacaaagaaggagaggaccgtttctttcctttgtctggatctttaatttttggcaaacaaggaactggaagagacaacgtggatgcggacaaagtcatgataaccaacgaagaagaaattaaaactactaacccggtagcaacggagtcctatggacaagcggccacaaaccaccagagtgcccaagcacaggcgcagaccggctgggttcaaaaccaaggaatacttccgggtatggtttggcaggacagagatgtgtacctgcaaggacccatttgggccaaaattcctcacacggacggcaactttcacccttctccgctgatgggagggtttggaatgaagcacccgcctcctcagatcctcatcaaaaacacacctgtacctgcggatcctccaacggccttcaacaaggacaagctgaactctttcatcacccagtattctactggccaagtcagcgtggagatcgagtgggagctgcagaaggaaaacagcaagcgctggaacccggagatccagtacacttccaactattacaagtctaataatgttgaatttgctgttaatactgaaggtgtatatagtgaaccccgccccattggcaccagatacctgactcgtaatctg

SEQ ID NO: 982 - DNA, 2208 bp, synthetic construct
  source 1..2208: mol_type = other DNA; note = Description of Artificial Sequence: Synthetic polynucleotide
atggctgccgatggttatcttccagattggctcgaggacaaccttagtgaaggaattcgcgagtggtgggctttgaaacctggagcccctcaacccaaggcaaatcaacaacatcaagacaacgctcggggtcttgtgcttccgggttacaaataccttggacccggcaacggactcgacaagggggagccggtcaacgcagcagacgcggcggccctcgagcacgacaaggcctacgaccagcagctcaaggccggagacaacccgtacctcaagtacaaccacgccgacgccgagttccaggagcggctcaaagaagatacgtcttttgggggcaacctcgggcgagcagtcttccaggccaaaaagaggcttcttgaacctcttggtccggttgaggaagcggctaagacggctcctggaaagaagaggcctgtagagcagtctcctcaggaaccggactcctccgcgggtattggcaaatcgggtgcacagcccgctaaaaagagactcaatttcggtcagactggcgacacagagtcagtcccagaccctcaaccaatcggagaacctcccgcagccccctcaggtgtgggatctcttacaatggcttcaggtggtggcgcaccagtggcagacaataacgaaggtgccgatggagtgggtagttcctcgggaaattggcattgcgattcccaatggctgggggacagagtcatcaccaccagcacccgaacctgggccctgcccacctacaacaatcacctctacaagcaaatctccaacagcacatctggaggatcttcaaatgacaacgcctacttcggctacagcaccccctgggggtattttgacttcaacagattccactgccacttctcaccacgtgactggcggcgactcatcaacaacaactggggattccggcctaagcgactcaacttcaagctcttcaacattcaggtcaaagaggttacggacaacaatggagtcaagaccatcgccaataaccttaccagcacggtccaggtcttcacggactcagactatcagctcccgtacgtgctcgggtcggctcacgagggctgcctcccgccgttcccagcggacgttttcatgattcctcagtacgggtatctgacgcttaatgatggaagccaggccgtgggtcgttcgtccttttactgcctggaatatttcccgtcgcaaatgctaagaacgggtaacaacttccagttcagctacgagtttgagaacgtacctttccatagcagctacgctcacagccaaagcctggaccgactaatgaatccactcatcgaccaatacttgtactatctctcaaagactattaacggttctggacagaatcaacaaacgctaaaattcagtgtggccggacccagcaacatggctgtccagggaagaaactacatacctggacccagctaccgacaacaacgtgtctcaaccactgtgactcaaaacaacaacagcgaatttgcttggcctggagcttcttcttgggctctcaatggacgtaatagcttgatgaatcctggacctgctatggccagccacaaagaaggagaggaccgtttctttcctttgtctggatctttaatttttggcaaacaaggaactggaagagacaacgtggatgcggacaaagtcatgataaccaacgaagaagaaattaaaactactaacccggtagcaacggagtcctatggacaagtggccacaaaccaccagagtgcccaagcacaggcgcagaccggctgggttcaaaaccaaggaatacttccgggtatggtttggcaggacagagatgtgtacctgcaaggacccatttgggccaaaattcctcacacggacggcaactttcacccttctccgctgatgggagggtttggaatgaagcacccgcctcctcagatcctcatcaaaaacacacctgtacctgcggatcctccaacggccttcaacaaggacaagctgaactctttcatcacccagtattctactggccaagtcagcgtggagatcgagtgggagctgcagaaggaaaacagcaagcgctggaacccggagatccagtacacttccaactattacaagtctaataatgttgaatttgctgttaatactgaaggtgtatatagtgaaccccgccccattggcaccagatacctgactcgtaatctg

SEQ ID NO: 983 - DNA, 2208 bp, synthetic construct
  source 1..2208: mol_type = other DNA; note = Description of Artificial Sequence: Synthetic polynucleotide
atggctgccgatggttatcttccagattggctcgaggacaaccttagtgaaggaattcgcgagtggtgggctttgaaacctggagcccctcaacccaaggcaaatcaacaacatcaagacaacgctcgaggtcttgtgcttccgggttacaaataccttggacccggcaacggactcgacaagggggagccggtcaacgcagcagacgcggcggccctcgagcacgacaaggcctacgaccagcagctcaaggccggagacaacctgtacctcaagtacaaccacgccgacgccgagttccaggagcggctcaaagaagatacgtcttttgggggcaacctcgggcgagcagtcttccaggccaaaaagaggcttcttgaacctcttggtctggttgaggaagcggctaagacggctcctggaaagaagaggcctgtagagcagtctcctcaggaaccggactcctccgcgggtattggcaaatcgggtgcacagcccgctaaaaagagactcaatttcggtcagactggcgacacagagtcagtcccagaccctcaaccaatcggagaacctcccgcagccccctcaggtgtgggatctcttacaatggcttcaggtggtggcgcaccagtggcagacaataacgaaggtgccgatggagtgggtagttcctcgggaaattggcattgcgattcccaatggctgggggacagagtcatcaccaccagcacccgaacctgggccctgcccacctacaacaatcacctctacaagcaaatctccaacagcacatctggaggatcttcaaatgacaacgcctacttcggctacagcaccccctgggggtattttgacttcaacagattccactgccacttctcaccacgtgactggcagcgactcatcaacaacaactggggattccggcctaagcgactcaacttcaagctcttcaacattcaggtcaaagaggttacggacaacaatggagtcaagaccatcgccaataaccttaccagcacggtccaggtcttcacggactcagactatcagctcccgtacgtgctcgggtcggctcacgagggctgcctcccgccgttcccagcggacgttttcatgattcctcagtacgggtatctgacgcttaatgatggaagccaggccgtgggtcgttcgtccttttactgcctggaatatttcccgtcgcaaatgctaagaacgggtaacaacttccagttcagctacgagtttgagaacgtacctttccatagcagctacgctcacagccaaagcctggaccgactaatgaatccactcatcgaccaatacttgcactatctctcaaagactattaacggttctggacagaatcaacaaacgctaaaattcagtgtggccggacccagcaacatggctgtccagggaagaaactacatacctggacccagctaccgacaacaacgtgtctcaaccactgtgactcaaaacaacaacagcgaatttgcttggcctggagcttcttcttgggctctcaatggacgtaatagcttgatgaatcctggacctgctatggccagccacaaagaaggagaggaccgtttctttcctttgtctggatctttaatttttggcaaacaaggaactggaagagacaacgtggatgcggacaaagtcatgataaccaacgaagaagaaattaaaactactaacccggtagcaacggagtcctatggacaagtggccacaaaccaccagagtgcccaagcacaggcgcagaccggctgggttcaaaaccaaggaatacttccgggtatggtttggcaggacagagatgtgtacctgcaaggacccatttgggccaaaattcctcacacggacggcaactttcacccttctccgctgatgggagggtttggaatgaagcacccgcctcctcagatcctcatcaaaaacacacctgtacctgcggatcctccaacggccttcaacaaggacaagctgaactctttcatcacccagtattctactggccaagtcagcgtggagatcgagtgggagctgcagaaggaaaacagcaagcgctggaacccggagatccagtacacttccaactattacaagtctaataatgttgaatttgctgttaatactgaaggtgtatatagtgaaccccgccccattggcaccagatacctgactcgtaatctg

SEQ ID NO: 984 - DNA, 2208 bp, synthetic construct
  source 1..2208: mol_type = other DNA; note = Description of Artificial Sequence: Synthetic polynucleotide
atggctgccgatggttatcttccagattggctcgaggacaaccttagtgaaggaattcgcgagtggtgggctttgaaacctggagcccctcaacccaaggcaaatcaacaacatcaagacaacgctcgaggtcttgtgcttccgggttacaaataccttggacccggcaacggactcgacaagggggagccggtcaacgcagcagacgcggcggccctcgagcacgacaaggcctacgaccagcagctcaaggccggagacaacccgtacctcaagtacaaccacgccgacgccgagttccaggagcggctcaaagaagatacgtcttttgggggcaacctcgggcgagcagtcttccaggccaaaaagaggcttcttgaacctcttggtctggttgaggaagcggctaagacggctcctggaaagaagaggcctgtagagcagtctcctcaagaaccggactcctccgcgggtattggcaaatcgggtgcacagcccgctaaaaagagactcaatttcggtcagactggcgacacagagtcagtcccagaccctcaaccaatcggagaacctcccgcagccccctcaggtgtgggatctcttacaatggcttcaggtggtggcgcaccagtggcagacaataacgaaggtgccgatggagtgggtagttcctcgggaaattggcattgcgattcccaatggctgggggacagagtcatcaccaccagcacccgaacctgggccctgcccacctacaacaatcacctctacaagcaaatctccaacagcacatctggaggatcttcaaatgacaacgcctacttcggctacagcaccccctgggggtattttgacttcaacagattccactgccacttctcaccacgtgactggcagcgactcatcaacaacaactggggattccggcctaagcgactcaacttcaagctcttcaacattcaggtcaaagaggttacggacaacaatggagtcaagaccatcgccaataaccttaccagcacggtccaggtcttcacggactcagactatcagctcccgtacgtgctcgggtcggctcacgagggctgcctcccgccgttcccagcggacgttttcatgattcctcagtacgggtatctgacgcttaatgatggaagccaggccgtgggtcgttcgtccttttactgcctggaatatttcccgtcgcaaatgctaagaacgggtaacaacttccagttcagctacgagtttgagaacgtacctttccatagcagctacgctcacagccaaagcctggaccgactaatgaatccactcatcgaccaatacttgcactatctctcaaagactattaacggttctggacagaatcaacaaacgctaaaattcagtgtggccggacccagcaacatggctgtccagggaagaaactacatacctggacccagctaccgacaacaacgtgtctcaaccactgtgactcaaaacaacaacagcgaatttgcttggcctggagcttcttcttgggctctcaatggacgtaatagcttgatgaatcctggacctgctatggccagccacaaagaaggagaggaccgtttctttcctttgtctggatctttaatttttggcaaacaaggaactggaagagacaacgtggatgcggacaaagtcatgataaccaacgaagaagaaattaaaactactaacccggtagcaacggagtcctatggacaagtggccacaaaccaccagagtgcccaagcacaggcgcagaccggctgggttcaaaaccaaggaatacttccgggtatggtttggcaggacagagatgtgtacctgcaaggacccatttgggccaaaattcctcacacggacggcaactttcacccttctccgctgatgggagggtttggaatgaagcacccgcctcctcagatcctcatcaaaaacacacctgtacctgcggatcctccaacggccttcaacaaggacaagctgaactctttcatcacccagtattctactggccaagtcagcgtggagatcgagtgggagctgcagaaggaaaacagcaagcgctggaacccggagatccagtacacttccaactattacaagtctaataatgttgaatttgctgttaatactgaaggtgtatatagtgaaccccgccccattggcaccagatacctgactcgtaatctg

SEQ ID NO: 985 - DNA, 2208 bp, synthetic construct
  source 1..2208: mol_type = other DNA; note = Description of Artificial Sequence: Synthetic polynucleotide
  misc_difference 1325: note = modified_base - a, c, t, g, unknown or other
atggctgccgatggttatcttccagattggctcgaggacaaccttagtgaaggaattcgcgagtggtgggctttgaaacctggagcccctcaacccaaggcaaatcaacaacatcaagacaacgctcgaggtcttgtgcttccgggttacaaataccttggacccggcaacggactcgacaagggggagccggtcaacgcagcagacgcggcggccctcgagcacgacaaggcctacgaccagcagctcaaggccggagacaacccgtacctcaagtacaaccacgccgacgccgagttccaggagcggctcaaagaagatacgtcttttgggggcaacctcgggcgagcagtcttccaggccaaaaagaggcttcttgaacctcttggtctggttgaggaagcggctaagacggctcctggaaagaagaggcctgtagagcagtctcctcaggaaccggactcctccgcgggtattggcaaatcgggtgcacagcccgctaaaaagagactcaatttcggtcagactggcgacacagagtcagtcccagaccctcaaccaatcggagaacctcccgcagccccctcaggtgtgggatctcttacaatggcttcaggtggtggcgcaccagtggcagacaataacgaaggtgccgatggagtgggtagttcctcgggaaattggcattgcgattcccaatggctgggggacagagtcatcaccaccagcacccgaacctgggccctgcccacctacaacaatcacctctacaagcaaatctccaccagcacatctggaggatcttcaaatgacaacgcctacttcggctacagcaccccctgggggtattttgacttcaacagattccactgccacttctcaccacgtgactggcagcgactcatcaacaacaactggggattccggcctaagcgactcaacttcaagctcttcaacattcaggtcaaagaggttacggacaacaatggagtcaagaccatcgccaataaccttaccagcacggtccaggtcttcacggactcagactatcagctcccgtacgtgctcgggtcggctcacgagggctgcctcccgccgttcccagcggacgttttcatgattcctcagtacgggtatctgacgcttaatgatggaagccaggccgtgggtcgttcgtccttttactgcctggaatatttcccgtcgcaaatgctaagaacgggtaacaacttccagttcagctacgagtttgagaacgtacctttccatagcagctacgctcacagccaaagcctggaccgactaatgaatccactcatcgaccnatacttgcactatctctcaaagactattaacggttctggacagaatcaacaaacgctaaaattcagtgtggccggacccagcaacatggctgtccagggaagaaactacatacctggacccagctaccgacaacaacgtgtctcaaccactgtgactcaaaacaacaacagcgaatttgcttggcctggagcttcttcttgggctctcaatggacgtaatagcttgatgaatcctggacctgctatggccagccacaaagaaggagaggaccgtttctttcctttgtctggatctttaatttttggcaaacaaggaactggaagagacaacgtggatgcggacaaagtcatgataaccaacgaagaagaaattaaaactactaacccggtagcaacggagtcctatggacaagtggccacaaaccaccagagtgcccaagcacaggcgcagaccggctgggttcaaaaccaaggaatacttccggatatggtttggcaggacagagatgtgtacctgcaaggacccatttgggccaaaattcctcacacggacggcaactttcacccttctccgctgatgggagggtttggaatgaagcacccgcctcctcagatcctcatcaaaaacacacctgtacctgcggatcctccaacggccttcaacaaggacaagctgaactctttcatcacccagtattctactggccaagtcagcgtggagatcgagtgggagctgcagaaggaaaacagcaagcgctggaacccggagatccagtacacttccaactattacaagtctaataatgttgaatttgctgttaatactgaaggtgtatatagtgaaccccgccccattggcaccagatacctgactcgtaatctg

SEQ ID NO: 986 - DNA, 2208 bp, synthetic construct
  source 1..2208: mol_type = other DNA; note = Description of Artificial Sequence: Synthetic polynucleotide
atggctgccgatggttatcttccagattggctcgaggacaaccttagtgaaggaattcgcgagtggtgggctttgaaacctggagcccctcaacccaaggcaaatcaacaacatcaagacaacgctcgaggtcttgtgcttccgggttacaaataccttggacccggcaacggactcgacaagggggagccggtcaacgcagcagacgcggcggccctcgagcacgacaaggcctacgaccagcagctcaaggccggagacaacccgtacctcaagtacaaccacgccgacgccgagttccaggagcggctcaaagaagatacgtcttttgggggcaacctcgggcgagcagtcttccaggccaaaaagaggcttcttgaacctcttggtctggttgaggaagcggctaagacggctcctggaaagaagaggcctgtagagcagtctcctcaggaaccggactcctccgcgggtattggcaaatcgggtgcacagcccgctaaaaagagactcaatttcggtcagactggcgacacagagtcagtcccagaccctcaaccaatcggagaacctcccgcagccccctcaggtgtgggatctcttacaatggcttcaggtggtggcgcaccagtggcagacaataacgaaggtgccgatggagtgggtagttcctcgggaaattggcattgcgattcccaatggctgggggacagagtcatcaccaccagcacccgaacctgggccctgcccacctacaacaatcacctctacaagcaaatctccaacagcacatctggaggatcttcaaatgacaacgcctacttcggctacagcaccccctgggggtattttgacttcaacagattccactgccacttctcaccacgtgactggcagcgactcatcaacaacaactggggattccggcctaagcgactcaacttcaagctcttcaacattcaggtcaaagaggttacggacaacaatggagtcaagaccatcgccaataaccttaccagcacggtccaggtcttcacggactcagactatcagctcccgtacgtgctcgggtcggctcacgagggctgcctcccgccgttcccagcggacgttttcatgattcctcagtacgggtatctgacgcttaatgatggaagccaggccgtgggtcgttcgtccttttactgcctggaatatttcccgtcgcaaatgctaagaacgggtaacaacttccagttcagctacgagtttgagaacgtacctttccatagcagctacgctcacagccaaagcctggaccgactaatgaatccactcatcgaccaatacttgcactatctctcaaagactattaacggttctggacagaatcaacaaacgctaaaattcagtgtggccggacccagcaacatggctgtccagggaagaaactacatacctggacccagctaccgacaacaacgtgtctcaaccactgtgactcaaaacaacaacagcgaatttgcttggcctggagcttcttcttgggctctcaatggacgtaatagcttgatgaatcctggacctgctatggccagctacaaagaaggagaggacagtttctttcctttgtctggatctttaatttttggcaaacaaggaactggaagagacaacgtggatgcggacaaagtcatgataaccaacgaagaagaaattaaaactactaacccggtagcaacggagtcctatggacaagtggccacaaaccaccagagtgcccaagcacaggcgcagaccggctgggttcaaaaccaaggaatacttccgggtatggtttggcaggacagagatgtgtacctgcaaggacccatttgggccaaaattcctcacacggacggcaactttcacccttctccgctgatgggagggtttggaatgaagcacccgcctcctcagaccctcatcaaaaacacacctgtacctgcggatcctccaacggccttcaacaaggacaagctgaactctttcatcacccagtattctactggccaagtcagcgtggagatcgagtgggagctgcagaaggaaaacagcaagcgctggaacccggagatccagtacacttccaactattacaagtctaataatgttgaatttgctgttaatactgaaggtgtatatagtgaaccccgccccattggcaccagatacctgactcgtaatctg

SEQ ID NO: 987 - DNA, 2208 bp, synthetic construct; identical to SEQ ID NO: 970
  source 1..2208: mol_type = other DNA; note = Description of Artificial Sequence: Synthetic polynucleotide

SEQ ID NO: 988 - DNA, 2208 bp, synthetic construct
  source 1..2208: mol_type = other DNA; note = Description of Artificial Sequence: Synthetic polynucleotide
atggctgccgatggttatcttccagattggctcgaggacaaccttagtgaaggaattcgcgagtggtgggctttgaaacctggagcccctcaacccagggcaaatcaacaacatcaagacaacgctcgaggtcttgtgcttccgggttacaaataccttggacccggcaacggactcgacaagggggagccggtcaacgcagccgacgcggcggccctcgagcacgacaaggcctacgaccagcagctcaaggccggagacaacccgtacctcaagtacaaccacgccgacgccgagttccaggagcggctcaaagaagatacgtcttttgggggcaacctcgggcgagcagtcttccaggccaaaaagaggcttcttgaacctcttggtctggttgaggaagcggctaagacggctcctggaaagaagaggcctgtagagcagtctcctcaggaaccggactcctccgcgggtattggcaaatcgggtgcacagcccgctaaaaagagactcaatttcggtcagactggcgacacagagtcagtcccagaccctcaaccaatcggagaacctcccgcagccccctcaggtgtgggatctcttacaatggcttcaggtggtggcgcaccagtggcagacaataacgaaggtgccgatggagtgggtagttcctcgggaaattggcattgcgattcccaatggctgggggacagagtcatcaccaccagcacccgaacctgggccctgcccacctacaacaatcacctctacaagcaaatctccaacagcacatctggaggatcttcaaatgacaacgcctacttcggctacagcaccccctgggggtattttgacttcaacagattccactgccacttctcaccacgtgactggcagcgactcatcaacaacaactggggattccggcctaagcgactcaacttcaagctcttcaacattcaggtcaaagaggttacggacaacaatggagtcaagaccatcgccaataaccttaccagcacggtccaggtcttcacggactcagactgtcagctcccgtacgtgctcgggtcggctcacgagggctgcctcccgccgttcccagcggacgttttcatgattcctcagtacgggtatctgacgcttaatgatggaagccaggccgtgggtcgttcgtccttttactgcctggaatatttcccgtcgcaaatgctaagaacgggtaacaacttccagttcagctacgagtttgagaacgtacctttccatagcagctacgctcacagccaaagcctggaccgactaacgaatccactcatcgaccaatacttgtactatctctcaaagactattaacggttctggacagaatcaacaaacgctaaaattcagtgtggccggacccagcaacatggctgtccagggaagaaactacatacctggacccagctaccgacaacaacgtgtctcaaccactgtgactcaaaacaacaacagcgaatttgcttggcctggagcttcttcttgggctctcaatggacgtaatagcttgatgaatcctggacctgctatggccagccacaaagaaggagaggaccgtttctttcctttgtctggatctttaatttttggcaaacaaggaactggaagagacaacgtggatgcggacaaagtcatgataaccaacgaagaagaaattaaaactactaacccggtagcaacggagtcccatggacaagtggccacaaaccaccagagtgcccaagcacaggcgcagaccggctgggttcaaaaccaaggaatacttccgggtatggtttggcaggacagagatgtgtacctgcaaggacccatttgggccaaaattcctcacacggacggcaactttcacccttctccgctgatgggagggtttggaatgaagcacccgcctcctcagatcctcatcaaaaacacacctgtacctgcggatcctccaacggccttcaacaaggacaagctgaactctttcatcacccagtattctactggccaagtcagcgtggagatcgagtgggagctgcagaaggaaaacagcaagcgctggaacccggagatccagtacacttccaactattacaagtctaataatgttgaatttgctgttaatactgaaggtgtatatagtgaaccccgccccattggcaccagatacctgactcgtaatctg

SEQ ID NO: 989 - DNA, 2208 bp, synthetic construct
  source 1..2208: mol_type = other DNA; note = Description of Artificial Sequence: Synthetic polynucleotide
atggctgccgatggttatcttccagattggctcgaggacaaccttagtgaaggaattcgcgagtggtgggctttgaaacctggagcccctcaacccaaggcaaatcaacaacatcaagacaacgctcgaggtcttgtgcttccgggttacaaataccttggacccggcaacggactcgacaagggggagccggtcaacgcagcagacgcggcggccctcgagcacgacaaggcctacgaccagcagctcaaggccggagacaacccgtacctcaagtacaaccacgccgacgccgagttccaggagcggctcaaagaagatacgtcttttgggggcaacctcgggcgagcagtcttccaggccaaaaagaggcttcttgaacctcttggtctggttgaggaagcggctaagacggctcctggaaagaagaggcctgtagagcagtctcctcaggaaccggactcctccgcgggtattggcaaatcgggtgcacagcccgctaagaagagactcaatttcggtcagactggcgacacagagtcagtcccagaccctcaaccaatcggagaacctcccgcagccccctcaggtgtgggatctcttacaatggcttcaggtggtggcgcaccagtggcagacaataacgaaggtgccgatggagtgggtagttcctcgggaaattggcattgcgattcccaatggctgggggacagagtcatcaccaccagcacccgaacctgggccctgcccacctacaacaatcacctctacaagcaaatctccaacagcacatctggaggatcttcaaatgacaacgcctacttcggctacagcaccccctgggggtattttgacttcaacagattccactgccacttctcaccacgtgactggcagcgactcatcaacaacaactggggattccggcctaagcgactcaacttcaagctcttcaacattcaggtcaaagaggttacggacaacaatggagtcaagaccatcgccaataaccttaccagcacggtccaggtcttcacggactcagactatcagctcccgtacgtgctcgggtcggctcacgagggctgcctcccgccgttcccagcggacgttttcatgattcctcagtacgggtatctgacgcttaatgatggaagccaggccgtgggtcgttcgtccttttactgcctggaatatttcccgtcgcaaatgctaagaacgggtaacaacttccagttcagctacgagtttgagaacgtacctttccatagcagctacgctcacagccaaagcctggaccgactaatgaatccacccatcgaccaatacttgtactatctctcaaagactattaacggttctggacagaatcaacaaacgctaaaattcagtgtggccggacccagcaacatggctgtccagggaagaaactacatacctggacccagctaccgacaacaacgtgtctcaaccactgtgactcaaaacaacaacagcgaatttgcttggcctggagcttcttcttgggctctcaatggacgtaatagcttgatgaatcctggacctgctatggccagccacaaagaaggagaggaccgtttctttcctttgtctggatctttaatttttggcaaacaaggaactggaagagacaacgtggatgcggacaaagtcatgataaccaacgaagaagaaattaaaactactaacccggtagcaacggagtcctatggacaagtggccacaaaccaccagagtgcccaagcacaggcgcagaccggctgggttcaaaaccaaggaatacttccgggtatggtttggcaggacagagatgtgtacctgcaaggacccatttgggccaaaattcctcacacggacggcaactttcacccttctccgctgatgggagggtttggaatgaagcacccgcctcctcagatcctcatcaaaaacacacctgtacctgcggatcctccaacggccttcaacaaggacaagctgaactctttcatcacccagtattctactggccaagtcagcgtggagatcgagtgggagctgcagaaggaaaacagcaagcgctggaacccggagatccagtacacttccaactattacaagtctaataatgttgaatttgctgttaatactgaaggtgtatatggtgaaccccgccccattggcaccagatacctgactcgtaatctg

SEQ ID NO: 990 - DNA, 2208 bp, synthetic construct
  source 1..2208: mol_type = other DNA; note = Description of Artificial Sequence: Synthetic polynucleotide
atggctgccgatggttatcttccagattggctcgaggacaaccttagtgaaggaattcgcgagtggtgggctttgaaacctggagcccctcaacccaaggcaaatcaacaacatcaagacaacgctcgaggtcttgtgcttccgggttacaaataccttggacccggcaacggactcgacaagggggagccggtcaacgcagcagacgcggcggccctcgagcacgacaaggcctacgaccagcagctcaaggccggagacaacccgtacctcaagtacaaccacgccgacgccgagttccaggagcggctcaaagaagatacgtcttttgggggcaacctcgggcgagcagtcttccaggccaaaaagaggcttcttgaacctcttggtctggttgaggaagcggctaagacggctcctggaaagaagaggcctgtagagcagtctcctcaggaaccggactcctccgcgggtattggcaaatcgggtgcacagcccgctaaaaagagactcaatttcggtcagactggcgacacagagtcagtcccagaccctcaaccaatcggagaacctcccgcagccccctcaggtgtgggatctcttacaatggcttcaggtggtggcgcaccagtggcagacaataacgaaggtgccgatggagtgggtagttcctcgggaaattggcattgcgattcccaatggctgggggacagagtcatcaccaccagcacccgaacctgggccctgcccacctacaacaatcacctctacaagcaaatctccaacagcacatctggaggatcttcaaatgacaacgcctacttcggctacagcaccccctgggggtattttgacttcaacagattccactgccacttctcaccacgtgaccggcagcgactcatcaacaacaactggggattccggcctaagcgactcaacttcaagctcttcaacattcaggtcaaagaggttacggacaacaatggagtcaagaccatcgccaataaccttaccagcacggtccaggtcttcacggactcagactatcagctcccgtacgtgctcgggtcggctcacgagggctgcctcccgccgttcccagcggacgttttcatgattcctcagtacgggtatctgacgcttaatgatggaagccaggccgtgggtcgttcgtccttttactgcctggaatatttcccgtcgcaaatgctaagaacgggtaacaacttccagttcagctacgagtttgagaacgtacctttccatagcagctacgctcacagccaaagcctggaccgactaatgaatccactcatcgaccaatacttgtactatctctcaaagactattaacggttctggacagaatcaacaaacgctaaaattcagtgtggccggacccagcaacatggctgtccagggaagaaactacatacctggacccagctaccgacaacaacgtgtctcaaccactgtgactcaaaacaacaacagcgaatttgcttggcctggagcttcttcttgggctctcaatggacgtaatagcttgatgaatcctggacctgctatggccagccacaaagaaggagaggaccgtttctttcctttgtctggatctttaatttttggcaaacaaggaactggaagagacaacgtggatgcggacaaagtcatgataaccaacgaagaagaaattaaaactactaacccggtagcaacggagtcctatggacaagtggccacaaaccaccagagtgcccaagcacaggcgcagaccggctgggttcaaaaccaaggaatacttccgggtatggtttggcaggacagagatgtgtacctgcaaggacccatttgggccaaaattcctcacacggacggcaactttcacccttctccgctgatgggagggtttggaatgaagcacccgcctcctcagatcctcatcaaaaacacacctgtacctgcggatcctccaacggccttcaacaaggacaagctgaactctttcatcacccagtattctactggccaagtcagcgtggagatcgagtgggagctgcagaaggaaaacagcaagcgctggaacccggagatccagtacacttccaactattacaagtctaataatgttgaatttgctgttaatactgaaggtgtatatagtgaaccccgccccattggcaccagatacctgactcgtaatctg

SEQ ID NO: 991 - DNA, 2208 bp, synthetic construct
  source 1..2208: mol_type = other DNA; note = Description of Artificial Sequence: Synthetic polynucleotide
atggctgccgatggttatcttccagattggctcgaggacaaccttagtgaaggaattcgcgagtggtgggctttgaaacctggagcccctcaacccaaggcaaatcaacaacatcaagacaacgctcgaggtcttgtgcttccgggttacaaataccttggacccggcaacggactcgacaagggggagccggtcaacgcagcagacgcggcagccctcgagcacgacaaggcctacgaccagcagctcaaggccggagacaacccgtacctcaagtacaaccacgccgacgccgagttccaggagcggctcaaagaagatacgtcttttgggggcaacctcgggcgagcagtcttccaggccaaaaagaggcttcttgaacctcttggtctggttgaggaagcggctaagacggctcctggaaagaagaggcctgtagagcagtctcctcaggaaccggactcctccgcgggtattggcaaatcgggtgcacagcccgctaaaaagagactcaatttcggtcagactggcgacacagagtcagtcccagaccctcaaccaatcggagaacctcccgcagccccctcaggtgtgggatctcttacaatggcttcaggtggtggcgcaccagtggcagacaataacgaaggtgccgatggagtgggtagttcctcgggaaattggcattgcaattcccaatggctgggggacagagtcatcaccaccagcacccgaacctgggccctgcccacctacaacaatcacctctacaagcaaatctccaacagcacatctggaggatcttcaaatgacaacgcctacttcggctacagcaccccctgggggtattttgacttcaacagattccactgccacttctcaccacgtgactggcagcgactcatcaacaacaactggggattccggcctaagcgactcaacttcaagctcttcaacattcaggtcaaagaggttacggacaacaatggagtcaagaccatcgccaataaccttaccagcacggtccaggtcttcacggactcagactatcagctcccgtacgtgctcgggtcggctcacgagggctgcctcccgccgttcccagcggacgttttcatgattcctcagtacgggtatctgacgcttaatgatggaagccaggccgtgggtcgttcgtccttttactgcctggaatatttcccgtcgcaaatgctaagaacgggtaacaacttccagttcagctacgagtttgagaacgtacctttccatagcagctacgctcacagccaaagcctggaccgactaatgaatccactcatcgaccaatacttgtactatctctcaaagactattaacggttctggacagaatcaacaaacgctaaaattcagtgtggccggacccggcaacatggctgtccagggaagaaactacatacctggacccagctaccgacaacaacgtgtctcaaccactgtgactcaaaacaacaacagcgaatttgcttggcctggagcttcttcttgggctctcaatggacgtaatagcttgatgaatcctggacctgctatggccagccacaaagaaggagaggaccgtttctttcctttgtctggatctttaatttttggcaaacaaggaactggaagagacaacgtggatgcggacaaagtcatgataaccaacgaagaagaaattaaaactactaacccggtagcaacggagtcctatggacaagtggccacaaaccaccagagtgcccaagcacaggcgcagaccggctgggttcaaaaccaaggaatacttccgggtatggtttggcaggacagagatgtgtacctgcaaggacccatttgggccaaaattcctcacacggacggcaactttcacccttctccgctgatgggagggtttggaatgaagcacccgcctcctcagatcctcatcaagaacacacctgtacctgcggatcctccaacggccttcaacaaggacaagctgaactctttcatcacccagtattctactggccaagtcagcgtggagatcgagtgggagctgcagaaggaaaacagcaagcgctggaacccggagatccagtacacttccaactattacaagtctaataatgttgaatttgctgttaatactgaaggtgtatatagtgaaccccgccccattggcaccagatacctgactcgtaatctg

SEQ ID NO: 992 - DNA, 2208 bp, synthetic construct
  source 1..2208: mol_type = other DNA; note = Description of Artificial Sequence: Synthetic polynucleotide
atggctgccgatggttatcttccagattggctcgaggacaaccttagtgaaggaattcgcgagtggtgggctttgaaacctggagcccctcaacccaaggcaaatcaacaacatcaagacaacgctcgaggtcttgtgcttccgggttacagataccttggacccggcaacggactcgacaagggggagccggtcaacgcagcagacgcggcggccctcgagcacgacaaggcctacgaccagcagctcaaggccggagacaacccgtacctcaagtacaaccacgccgacgccgagttccaggagcggctcaaagaagatacgtcttttgggggtaacctcgggcgagcagtcttccaggccaaaaagaggcttcttgaacctcttggtctggttgaggaagcggctaagacggctcctggaaagaagaggcctgtagagcagtctcctcaggaaccggactcctccgcgggtatcggcaaatcgggtgcacagcccgctaaaaagagactcaatttcggtcagactggcgacacagagtcagtcccagaccctcaaccaatcggagaacctcccgcagccccctcaggtgtgggatctcttacaatggcttcaggtggtggcgcaccagtggcagacaataacgaaggtgccgatggagtgggtagttcctcgggaaattggcattgcgattcccaatggctgggggacagagtcatcaccaccagcacccgaacctgggccctgcccacctacaacaatcacctctacaagcaaatctccaacagcacatctggaggatcttcaaatgacaacgcctacttcggctacagcaccccctgggggtattttgacttcaacagattccactgccacttctcaccacgtgactggcagcgactcatcaacaacaactggggattccggcctaagcgactcaacttcaagctcttcaacattcaggtcaaagaggttacggacaacaatggagtcaagaccgtcgccaataaccttaccagcacggtccaggtcttcacggactcagactatcagctcccgtacgtgctcgggtcggctcacgagggctgcctcccgccgttcccagcggacgttttcatgattcctcagtacgggtatctgacgcttaatgatggaagccaggccgtgggtcgttcgtccttttactgcctggaatatttcccgtcgcaaatgctaagaacgggtaacaacttccagttcagctacgagtttgagaacgtacctttccatagcagctacgctcacagccaaagcctggaccgactaatgaatccactcatcgaccaatacttgtactatctctcaaagactattaacggttctggacagaatcaacaaacgctaaaattcagtgtggccggacccagcaacatggctgtccagggaagaaactacatacctggacccagctaccgacaacaacgtgtctcaaccactgtgactcaaaacaacaacagcgaatttgcttggcctggagcttcttcttgggctctcaatggacgtaatagcttgatgaatcctggacctgctatggccagccacaaagaaggagaggaccgtttctttcctttgtctggatctttaatttttggcaaacaaggaactggaagagacaacgtggatgcggacaaagtcatgataaccaacgaagaagaaattaaaactactaacccggtagcaacggagtcctatggacaagtggccacaaaccaccagagtgcccaagcacaggcgcagaccggctgggttcaaaaccaaggaatacttccgggtatggtttggcaggacagagatgtgtacctgcaaggacccatttgggccaaaattcctcacacggacggcaactttcacccttctccgctgatgggagggtttggaatgaagcacccgcctcctcagatcctcatcaaaaacacacctgtacctgcggatcctccaacggccttcaacaaggacaagctgaactctttcatcacccagtattctactggccaagtcagcgtggagatcgagtgggagctgcagaaggaaaacagcaagcgctggaacccggagatccagtacacttccaactattacaagtctaataatgttgaatttgctgttaatactgaaggtgtatatagtggaccccgccccattggcaccagatacctgactcgtaatctg

SEQ ID NO: 993 - DNA, 2208 bp, synthetic construct
  source 1..2208: mol_type = other DNA; note = Description of Artificial Sequence: Synthetic polynucleotide
atggctgccgatggttatcttccagattggctcgaggacaaccttagtgaaggaattcgcgagtggtgggctttgaaacctggagcccctcaacccaaggcaaatcaacaacatcaagacaacgctcgaggtcttgtgcttccgggttacaaataccttggacccggcaacggactcgacaagggggagccggtcaacgcagcagacgcggcggccctcgagcacgacaaggcctacgaccagcagctcaaggccggagacaacccgtacctcaagtacaaccacgccgacgccgagttccaggagcggctcaaagaagatacgtcttttgggggcaacctcgggcgagcagtcttccaggccaaaaagaggcttcttgaacctcttggtctggttgaggaagcggctaagacggctcctggaaagaagaggcctgtagagcagtctcctcaggaaccggactcctccgcgggtattggcaaatcgggtgcacagcccgctaaaaagagactcaatttcggtcagactggcgacacagagtcagtcccagaccctcaaccaatcggagaacctcccgcagccccctcaggtgtgggatctcttacaatggcttcaggtggtggcgcaccagtggcagacaataacgaaggtgccgatggagtgggtagttcctcgggaaattggcattgcgattcccaatggctgggggacagagtcatcaccaccagcacccgaacctgggccctgcccacctacaacaatcacctctacaagcaaatctccaacagcacatctggaggatcttcaaatgacaacgcctacttcggctacagcaccccctgggggtattttgacttcaacagattccactgccacttctcaccacgtgactggcagcgactcatcaacaacaactggggattccggcctaagcgactcaacttcaagctcttcaacattcaggtcaaagaggttacggacaacaatggagtcaagaccatcgccaataaccttaccagcacggtccaggtcttcacggactcagactatcagctcccgtacgtgctcgggtcggctcacgagggctgcctcccgccgttcccagcggacgttttcatgattcctcagtacgggtatctgacgcttaatgatggaagccaggccgtgggtcgttcgtccttttactgcctggaatatttcccgtcgcaaatgctaagaacgggtaacaacttccagttcagctacgagtttgagaacgtacctttccatagcagctacgctcacagccaaagcctggaccgactaatgaatccactcatcgaccaatacttgtactatctctcaaagactattaacggttctggacagaatcaacaaacgctaaaattcagtgtggccggacccagcaacatggctgtccagggaagaaactacatacctggacccagctaccgacaacaacgtgtctcaaccactgtgactcaaaacaacaacagcgaatttgcttggcctggagcttcttcttgggctctcaatggacgtaatagcttgatgaatcctggacctgctatggccagccacaaagaaggagaggaccgtttctttcctttgtctggatctttaatttttggcaaacaaggaactggaagagacaacgtggatgcggacaaagtcatgataaccaacgaagaagaaattaaaactactaacccggtagcaacggagtcctatggacaagtggccacaaaccaccagagtgcccaagcacaggcgcagaccggctgggttcaaaaccaaggaatacttccgggtatggtttggcaggacagagatgtgtacctgcaaggacccatttgggccaaaattcctcacacggacggcaactttcacccttctccgctgatgggagggtttggaatgaagcacccgcctcctcagatcctcatcaaaaacacacctgtacctgcggatcctccaacggccttcaacaaggacaagctgaactctttcatcacccagtattctactggccaagtcagcgtggagatcgagtgggagctgcagaaggaaaacagcaagcgctggaacccggagatccagtacacttccaactattacaagtctaataatgttgaatttgctgttaatactgaaggtgtatatagtgaaccccgccccattggcaccagatacctgactcgtaatctg

SEQ ID NO: 994 - DNA, 2208 bp, synthetic construct
  source 1..2208: mol_type = other DNA; note = Description of Artificial Sequence: Synthetic polynucleotide
atggctgccgatggttatcttccagattggctcgaggacaaccttagtgaaggaattcgcgagtggtgggctttgaaacctggagcccctcaacccaaggcaaatcaacaacgtcaagacaacgctcgaggtcttgtgcttccgggttacaaataccttggacccggcaacggactcgacaagggggagccggtcaacgcagcagacgcggcggccctcgagcacgacaaggcctacgaccagcagctcaaggccggaggcaacccgtgcctcaagtacaaccacgccgacgccgagttccaggagcggctcaaagaagatacgtcttttgggggcaacctcgggcgagcagtcttccaggccaaaaagaggcttcttgaacctcttggtctggttgaggaagcggctaagacggctcctggaaagaagaggcctgtagagcagtctcctcaggaaccggactcctccgcgggtattggcagatcgggtgcacagcccgctaaaaagagactcaatttcggtcagactggcgacacagagtcagtcccagaccctcaaccaatcggagaacctcccgcagccccctcaggtgtgggatctcttacaatggcttcaggtggtggcgcaccagtggcagacaataacgaaggtgccgatggagtgggtagttcctcgggaaattggcattgcgattcccaatggctgggggacagagtcatcaccaccagcacccgaacctgggccctgcccacctacaacaatcacctctacaagcaaatctccaacagcacatctggaggatcttcaaatgacaacgcctacttcggctacagcaccccctgggggtattttgacttcaacagattccactgccacttctcaccacgtgactggcagcgactcatcaacaacaactggggattccggcctaagcgactcaacttcaagctcttcaacattcaggtcaaagaggttacggacaacaatggagtcaaggccatcgccaataaccttaccagcacggtccaggtcttcacggactcagactatcagctcccgtacgtgctcgggtcggctcacgagggctgcctcccgccgttcccagcggacgttttcatgattcctcagtacgggtatctgacgcttaatgatggaagccaggccgtgggtcgttcgtccttttactgcctggaatatttcccgtcgcaaatgctaagaacgggtaacaacttccagttcagctacgagtttgagaacgtacctttccatagcagctacgctcacagccaaagcctggaccgactaatgaatccactcatcgaccaatacttgtactatctctcaaagactattgacggttctggacagaatcaacaaacgctaaaattcagtgtggccggacccagcaacatggctgtccagggaagaaactacatacctggacccagctaccgacaacaacgtgtctcaaccactgtgactcaaaacaacaacagcgaatttgcttggcctggagcttcttcttgggctctcaatggacgtaatagcttgatggatcctggacctgctatggccagccacaaagaaggagaggaccgtttctttcctttgtctggatctttaatttttggcaaacaaggaactggaagagacaacgtggatgcggacaaagtcatgataaccaacgaagaagaaattaaaactactaacccggtagcaacggagtcctatggacaagtggccacaaaccaccagagtgcccaagcacaggcgcagaccggctgggttcaaaaccaaggaatacttccgggtatggtttggcaggacagagatgtgtacctgcaaggacccatttgggccaaaattcctcacacgggcggcaactttcacccttctccgctgatgggagggtttggaatgaagcacccgcctcctcagatcctcatcaaaaacacacctgtacctgcggatcctccaacggccttcaacaaggacaagctgaactctttcatcacccagtattctactggccaagtcagcgtggagatcgagtgggagctgcagaaggaaaacagcaagcgctggaacccggagatccagtacacttccaactattacaagtctaataatgttgaatttgctgttaatactgaaggtgtatatagtgaaccccgccccattggcaccagatacctgactcgtaatctg

SEQ ID NO: 995 - DNA, 2208 bp, synthetic construct
  source 1..2208: mol_type = other DNA; note = Description of Artificial Sequence: Synthetic polynucleotide
atggctgccgatggttatcttccagattggctcgaggacaaccttagtgaaggaattcgcgagtggtgggctttgaaacctggagcccctcaacccaaggcaaatcaacaacatcaagacaacgctcgaggtcttgtgcttccgggttacaaataccttggacccggcaacggactcgacaagggggagccggtcaacgcagcagacgcggcggccctcgagcacgacaaggcctacgaccagcagctcaaggccggagacaacccgtacctcaagtacaaccacgccgacgccgagttccaggagcggctcaaagaagatacgtcttttgggggcaacctcgggcgagcagtcttccaggccaaaaagaggcttcttgaacctcttggtctggttgaggaagcggctaagacggctcctggaaagaagaggcctgtagagcagtctcctcaggaaccggactcctccgcgggtattggcaaatcgggtgcacagcccgctaaaaagagactcaatttcggtcagactggcgacacagagtcagtcccagaccctcaaccaatcggagaacctcccgcagccccctcaggtgtgggatctcttacaatggcttcaggtggtggcgcaccagtggcagacaataacgaaggtgccgatggagtgggtagttcctcgggaaattggcattgcgattcccaatggctgggggacagagtcatcaccaccagcacccgaacctgggccctgcccacctacaacaatcacctctacaagcaaatctccaacagcacatctggaggatcttcaaatgacaacgcctacttcggctacagcaccccctgggggtattttgacttcaacagattccactgccacttctcaccacgtgactggcagcgactcatcaacaacaactggggattccggcctaagcgactcaacttcaagctcttcaacattcaggtcaaagaggttacggacaacaatggagtcaagaccatcgccaataaccttaccagcacggtccaggtcttcacggactcagactatcagctcccgtacgtgctcgggtcggctcacgagggctgcctcccgccgttcccagcggacgttttcatgattcctcagtacgggtatctgacgcttaatgatggaagccaggccgtgggtcgttcgtccttttactgcctggaatatttcccgtcgcaaatgctaagaacgggtaacaacttccagttcagctacgagtttgagaacgtacctttccatagcagctacgctcacagccaaagcctggaccgactaatgaatccactcatcgaccaatacttgtactatctctcaaagactattaacggttctggacagaatcaacaaacgctaaaattcagtgtggccggacccagcaacatggctgtccagggaagaaactacatacctggacccagctaccgacaacaacgtgtctcaaccactgtgactcaaaacaacaacagcgaatttgcttggcctggagcttcttcttgggctctcaatggacgtaatagcttgatgaatcctggacctgctatggccagccacaaagaaggagaggaccgtttctttcctttgtctggatctttaatttttggcaaacaaggaactggaagagacaacgtggatgcggacaaagtcatgataaccaacgaagaagaaattaaaactactaacccggtagcaacggagtcctatggacaagtggccacaaaccaccagagtgcccaagcacaggcgcagaccggctgggttcaaaaccaaggaatacttccgggtatggtttggcaggacagagatgtgtacctgcaaggacccatttgggccaaaattcctcacacggacggcaactttcacccttctccgctgatgggagggtttggaatgaagcacccgcctcctcagatcctcatcaaaaacacacctgtacctgcggatcctccaacggccttcaacaaggacaagctgaactctttcatcacccagtattctactggccaagtcagcgtggagatcgagtgggagctgcagaaggaaaacagcaagcgctggaacccggagatccagtacacttccaactattacaagcctaataatgttgaatttgctgttaatactgaaggtgtatatagtgaaccccgccccattggcaccagatacctgactcgtaatctg

SEQ ID NO: 996 - DNA, 2208 bp, synthetic construct
  source 1..2208: mol_type = other DNA; note = Description of Artificial Sequence: Synthetic polynucleotide
atggctgccgatggttatcttccagattggctcgaggacaaccttagtgaaggaattcgcgagtggtgggctttgaaacctggagcccctcaacccaaggcaaatcaacaacatcaagacaacgctcgaggtcttgtgcttccgggttacaaataccttggacccggcaacggactcgacaagggggagccggtcaacgcagcagacgcggcggccctcgagcacaacaaggcctacgaccagcagctcaaggccggagacaacccgtacctcaagtgcaaccacgccgacgccgagttccaggagcggctcaaagaagatacgtcttttgggggcaacctcgggcgagcagtcttccaggccaaaaagaggcctcttgaacctcttggtctggttgaggaagcggctaagacggctcctggaaagaagaggcctgtagagcagtctcctcaggaaccggactcctccgcgggtattggcaaatcgggtgcacagcccgctaaaaagagactcaatttcggtcagactggcgacacagagtcagtcccagaccctcaaccaatcggagaacctcccgcagccccctcaggtgtgagatctcttacaatggcttcaggtggtggcgcaccagtggcagacaataacgaaggtgccgatggagtgggtagttcctcgggaaattggcattgcgattcccaatggctgggggacagagtcatcaccaccagcacccgaacctgggccctgcccacctacaacaatcacctctacaagcaaatctccaacagcacatctggaggatcttcaaatgacaacgcctacctcggctacagcaccccctgggggtattttgacttcaacagattccactgccacttctcaccacgtgactggcagcgactcatcaacaacaactggggattccggcctaagcgactcaacttcaagctcttcaacattcaggtcaaagaggttacggacaacaatggagtcaagaccatcgccaataaccttaccagcacggtccaggtcttcacggactcagactatcagctcccgtacgtgctcgggtcggctcacgagggctgcctcccgccgttcccagcggacgttttcatgattcctcagtacgggtatctgacgcttaatgatggaagccaggccgtgggtcgttcgtccttttactgcctggaatatttcccgtcgcaaatgctaagaacgggtaacaacttccagttcagctacgagtttgagaacgtacctttccatagcagctacgctcacagccaaagcctggaccgactaatgaatccactcatcgaccaatacttgtactatctctcaaagactattaacggttctggacagaatcaacaaacgctaaaattcagtgtggccggacccagcaacatggctgtccagggaagaaactacatacctggacccagctaccgacaacaacgtgtctcaaccactgtgactcaaaacaacaacagcgaatttgcttggcctggagcttcttcttgggctctcaatggacgtaatagcttgatgaatcctggacctactatggccagccacaaagaaggagaggaccgtttctttcctttgtctggatctttaatttttggcaaacaaggaactggaagagacaacgtggatgcggacaaagtcatgataaccaacgaagaagaaattaaaactactaacccggtagcaacggagtcctatggacaagtggccacaaaccaccagagtgcccaagcacaggcgcagaccggctgggttcaaaaccaaggaatacttccgggtatggtttggcaggacagagatgtgtacctgcaaggacccatttgggccaaaattcctcacacggacggcaactttcacccttctccgctgatgggagggtttggaatgaagcacccgcctcctcagatcctcatcaaaaacacacctgtacctgcggatcctccaacggccttcaacaaggacaagctgaactctttcatcacccagtattctactggccaagtcagcgtggagatcgagtgggagctgcagaaggaaaacagcaagcgctggaacccggagatccagtacacttccaactattacaagtctaataatgttgaatttgctgttaatactgaaggtgtatatagtgaaccccgccccattggcaccagatacctgactcgtaatctg

SEQ ID NO: 997 - DNA, 2208 bp, synthetic construct
  source 1..2208: mol_type = other DNA; note = Description of Artificial Sequence: Synthetic polynucleotide
atggctgccgatggttatcttccagattggctcgaggacaaccttagtgaaggaattcgcgagtggtgggctttgaaacctggagcccctcaacccaaggcaaatcaacaacatcaagacaacgctcgaggtcttgtgcttccgggttacaaataccttggacccggcaacggactcgacaagggggagccggtcaacgcagcagacgcggcggccctcgtgcacgacaaggcctacgaccagcagctcaaggccggagacaacccgtacctcaagtgcaaccacgccgacgccgagttccaggagcggctcaaagaagatacgtcttttgggggcaacctcgggcgagcagtcttccaggccaaaaagaggcttcttgaacctcttggtctggttgaggaagcggctaagacggctcctggaaagaagaggcctgtagagcagtctcctcaggaaccggactcctccgcgggtattggcaaatcgggtgcacagcccgctaaaaagagactcaatttcggtcagactggcgacacagagtcagtcccagaccctcaaccaatcggagaacctcccgcagccccctcaggtgtgggatctcttacaatggcttcaggtggtggcgcaccagtggcagacaataacgaaggtgccgatggagtgggtagttcctcgggaaattggcattgcgattcccaatggctgggggacagagtcatcaccaccagcacccgaacctgggccctgcccacctacaacaatcacctctacaagcaaatctccaacagcacatctggaggatcttcaaatgacaacgcctacctcggctacagcaccccctgggggtattttgacttcaacagattccactgccacttctcaccacgtgactggcagcgactcatcaacaacaactggggattccggcctaagcgactcaacttcaagctcttcaacattcaggtcaaagaggttacggacaacaatggagtcaagaccatcgccaataaccttaccagcacggtccaggtcttcacggactcagactatcagctcccgtacgtgctcgggtcggctcacgagggctgcctcccgccgttcccagcggacgttttcacgattcctcagtacgggtatctgacgcttaatgatggaagccaggccgtgggtcgttcgtccttttactgcctggaatatttcccgtcgcaaatgctaagaacgggtaacaacttccagttcagctacgagtttgagaacgtacctttccatagcagctacgctcacagccaaagcctggaccgactaatgaatccactcatcgaccaatacttgtactatctctcaaagactattaacggttctggacagaatcaacaaacgctaaaattcagtgtggccggacccagcaacatggctgtccagggaagaaactacatacctggacccagctaccgacaacaacgtgtctcaaccactgtgactcaaaacaacaacagcgaatttgcttggcctggagcttcttcttgggctctcaatggacgtaatagcttgatgaatcctggacctgctatggccagccacaaagaaggagaggaccgtttctttcctttgtctggatctttaatttttggcaaacaaggaactggaagagacaacgtggatgcggacaaagtcatgataaccaacgaagaagaaattaaaactactaacccggtagcaacggagtcctatggacaagtggccacaaaccaccagagtgcccaagcacaggcgcagaccggctgggttcaaaaccaaggaatacttccgggtatggtttggcaggacagagatgtgtacctgcaaggacccatttgggccaaaattcctcacacggacggcaactttcacccttctccgctgatgggagggtttggaatgaagcacccgcctcctcagatcctcatcaaaaacacacctgtacctgcggatcctccaacggccttcaacaaggacaagctgaactctttcatcacccagtattctactggccaagtcagcgtggagatcgagtgggagctgcagaaggaaaacagcaagcgctggaacccggagatccagtacacttccaactattacaagtctaataatgttgaatttgctgttaatactgaaggtgtatatagtgaaccccgccccattgggccccgatacctgactcgtaatttt

SEQ ID NO: 998 - DNA, 2208 bp, synthetic construct
  source 1..2208: mol_type = other DNA; note = Description of Artificial Sequence: Synthetic polynucleotide
atggctgccgatggttatcttccagattggctcgaggacaaccttagtgaaggaattcgcgagtggtgggctttgaaacctggagcccctcaacccaaggcaaatcaacaacatcaagacaacgctcgaggtcttgtgcttccgggttacaaataccttggacccggcaacggactcgacaagggggagccggtcaacgcagcagacgcggcggccctcgagcacaacaaggcctacgaccagcagctcaaggccggagacaacccgtacctcaagtgcaaccacgccgacgccgagttccaggagcggctcaaagaagatacgtcttttgggggcaacctcgggcgagcagtcttccaggccaaaaagaggcttcttgaacctcttggtctggttgaggaagcggctaagacggctcctggaaagaagaggcctgtagagcagtctcctcaggaaccggactcctccgcgggtattggcaaatcgggtgcacagcccgctaaaaagagactcaatttcggtcagactggcgacacagagtcagtcccagaccctcaaccaatcggagaacctcccgcagccccctcaggtgtgagatctcttacaatggcttcaggtggtggcgcaccagtggcagacaataacgaaggtgccgatggagtgggtagttcctcgggaaattggcattgcgattcccaatggctgggggacagagtcatcaccaccagcacccgaacctgggccctgcccacctacaacaatcacctctacaagcaaatctccaacagcacatctggaggatcttcaaatgacaacgcctacctcggctacagcaccccctgggggtattttgacttcaacagattccactgccacttctcaccacgtgactggcagcgactcatcaacaacaactggggattccggcctaagcgactcaacttcaagctcttcaacattcaggtcaaagaggttacggacaacaatggagtcaagaccatcgccaataaccttaccagcacggtccaggtcttcacggactcagactatcagctcccgtacgtgctcgggtcggctcacgagggctgcctcccgccgttcccagcggacgttttcatgattcctcagtacgggtatctgacgcttaatgatggaagccaggccgtgggtcgttcgtccttttactgcctggaatatttcccgtcgcaaatgctaagaacgggtaacaacttccagttcagctacgagtttgagaacgtacctttccatagcagctacgctcacagccaaagcctggaccgactaatgaatccactcatcgaccaatacttgtactatctctcaaagactattaacggttctggacagaatcaacaaacgctaaaattcagtgtggccggacccagcaacatggctgtccagggaagaaactacatacctggacccagctaccgacaacaacgtgtctcaaccactgtgactcaaaacaacaacagcgaatttgcttggcctggagcttcttcttgggctctcaatggacgtaatagcttgatgaatcctggacctgctatggccagccacaaagaaggagaggaccgtttctttcctttgtctggatctttaatttttggcaaacaaggaactggaagagacaacgtggatgcggacaaagtcatgataaccaacgaagaagaaattaaaactactaacccggtagcaacggagtcctatggacaagtggccacaaaccaccagagtgcccaagcacaggcgcagaccggctgggttcaaaaccaaggaatacttccgggtatggtttggcaggacagagatgtgtacctgcaaggacccatttgggccaaaattcctcacacggacggcaactttcacccttctccgctgatgggagggtttggaatgaagcacccgcctcctcagatcctcatcaaaaacacacctgtacctgcggatcctccaacggccttcaacaaggacaagctgaactctttcatcacccagtattctactggccaagtcagcgtggagatcgagtgggagctgcagaaggaaaacagcaagcgctggaacccggagatccagtacacttccaactattacaagtctaataatgttgaatttgctgttaatactgaaggtgtatatagtgaaccccgccccattggcaccagatacctgactcgtaatctg

SEQ ID NO: 999 - DNA, 2208 bp, synthetic construct
  source 1..2208: mol_type = other DNA; note = Description of Artificial Sequence: Synthetic polynucleotide
atggctgccgatggttatcttccagattggctcgaggacaaccttagtgaaggaattcgcgagtggtgggctttgaaacctggagcccctcaacccaaggcaaatcaacaacatcaagacaacgctcgaggtcttgtgcttccgggttacaaataccttggacccggcaacggactcgacaagggggagccggtcaacgcagcagacgcggcggccctcgagcacgacaaggcctacgaccagcagctcaaggccggagacaacccgtacctcaagtgcaaccacgccgacgccgagttccaggagcggctcaaagaagatacgtcttttgggggcaacctcgggcgagcagtcttccaggccaaaaagaggcttcttgaacctcttggtctggttgaggaagcggctaagacggctcctggaaagaagaggcctgtagagcagtctcctcaggaaccggactcctccgcgggtattggcaaatcgggtgcacagcccgctaaaaagagactcaatttcggtcagactggcgacacagagtcagtcccagaccctcaaccaatcggagaacctcccgcagccccctcaggtgtgggatctcttacaatggcttcaggcggtggcgcaccagtggcagacaataacgaaggtgccgatggagtgggtagttcctcgggaaattggcattgcgattcccaatggctgggggacagagtcatcaccaccagcacccgaacctgggccctgcccacctacaacaatcacctctacaagcaaatctccaacagcacatctggaggatcttcaaatgacaacgcctacctcggctacagcaccccctgggggtattttgacttcaacagattccactgccacttctcaccacgtgactggcagcgactcatcaacaacaactggggattccggcctaagcgactcaacttcgagctcttcaacattcaggtcaaagaggttacggacaacaatggagtcaagaccatcgccaataaccttaccagcacggtccaggtcttcacggactcagactatcagctcccgtacgtgctcgggtcggctcacgagggctgcctcccgccgttcccagcggacgttttcatgattcctcagtacgggtatctgacgcttaatgatggaagccaggccgtgggtcgttcgtccttttactgcctggaatatttcccgtcgcaaatgctaagaacgggtaacaacttccagtccagctacgagtttgagaacgtacctttccatagcagctacgctcacagccaaagcctggaccgactaatgaatccactcatcgaccaatacttgtactatctctcaaagactattaacggttctggacagaatcaacaaacgctaaaattcagtgtggccggacccagcaacatggctgtccagggaagaaactacatacctggacccagctaccgacaacaacgtgcctcaaccactgtgactcaaaacaacaacagcgaatttgcttggcctggagcttcttcttgggctctcaatggacgtaatagcttgatgaatcctggacctgctatggccagccacaaagaaggggaggaccgtttctttcctttgtctggatctttaatttttggcaaacaaggaactggaagagacaacgtggatgcggacaaagtcatgataaccaacgaagaagaaattaaaactactaacccggtagcaacggagtcctatggacaagtggccacaaaccaccagagtgcccaagcacaggcgcagaccggctgggttcaaaaccaaggaatacttccgggtatggtttggcaggacagagatgtgtacctgcaaggacccatttgggccaaaattcctcacacggacggcaactttcacccttctccgctgatgggagggtttggaatgaagcacccgcctcctcagatcctcatcaaaaacacacctgtacctgcggatcctccaacggccttcaacaaggacaagctgaactctttcatcacccagtattctactggccaagtcagcgtggagatcgagtgggagctgcagaaggaaaacagcaagcgctggaacccggagatccagtacacttccaactattacaagtctaataatgttgaatttgctgttaatactgaaggtgtatatagtgaaccccgccccattggcaccagatacctgactcgtaatctg

SEQ ID NO: 1000 - DNA, 2208 bp, synthetic construct
  source 1..2208: mol_type = other DNA; note = Description of Artificial Sequence: Synthetic polynucleotide
atggctgccgatggttatcttccagattggctcgaggacaaccttagtgaaggaattcgcgagtggtgggctttgaaacctggagcccctcaacccaaggcaaatcaacaacatcaagacaacgctcgaggtcttgtgcttccgggttacaaataccttggacccggcaacggactcgacaagggggagccggtcaacgcagcagacgcggcggccctcgagcacgacaaggcctacgaccagcagctcaaggccggagacaacccgtacctcaagtgcaaccacgccgacgccgagttccaggagcggctcaaagaagatacgtcttttgggggcaacctcgggcgagcagtcttccaggccaaaaagaggcttcttgaacctcttggtctggttgaggaagcggctaagacggctcctggaaagaagaggcctgtagagcagtctcctcaggaaccggactcctccgcgggtattggcaaatcgggtgcacagcccgctaaaaagagactcaatttcggtcagactggcgacacagagtcagtcccagaccctcaaccaatcggagaacctcccgcagcccccccaggtgtgggatctcttacaatggcttcaggtggtggcgcaccagtggcggacaataacgaaggtgccgatggagtgggtagttcctcgggaaattggcattgcgattcccaatggctgggggacagagtcatcaccaccagcacccgaacctgggccctgcccacctacaacaatcacctctacaagcaaatctccaacagcacatctggaggatcttcaaatgacaacgcctacctcggctacagcaccccctgggggtattttgacttcaacagattccactgccacttctcaccacgtgactggcagcgactcatcaacaacaactggggattccggcctaagcgactcaacttcaagctcttcaacattcaggtcaaagaggttacggacaacaatggagtcaagaccatcgccaataaccttaccagcacggtccaggtcttcacggactcagactatcagctcccgtacgtgctcgggtcggctcacgagggctgcctcccgccgttcccagcggacgttttcatgattcctcagtacgggtatctgacgcttaatgatggaagccaggccgtgggtcgttcgtccttttactgcctggaatatttcccgtcgcaaatgctaagaacgggtaacaacttccagttcagctacgagtttgagaacgtacctttccatagcagctacgctcacagccaaagcctggaccgactaatgaatccactcatcgaccaatacttgtactatctctcaaagactattagcggttctggacagaatcaacaaacgctaaaattcagtgtggccggacccagcaacatggctgtccagggaagaaactacatacctggacccagctaccgacaacaacgtgtctcaaccactgtgactcaaaacaacagcagcgaatttgcttggcctggagcttcttcttgggctctcaatggacgtaatagcttgatgaatcctggacctgctatggccagccacaaagaaggagaggaccgtttctttcctttgtctggatctttaatttttggcaaacaaggaactggaagagacaacgtggatgcggacaaagtcatgataaccaacgaagaagaaattaaaactactaacccggtagcaacggagtcctatggacaagtggccacaaaccaccagagtgcccaagcacaggcgcagaccggctgggttcaaaaccaaggaatactttcgggtatggtttggcaggacagagatgtgtacctgcaaggacccatttgggccaaaattcctcacacggacggcaactttcacccttctccgctgatgggagggtttggaatgaagcacccgcctcctcagatcctcatcaaaaacacacctgtacctgcggatcctccaacggccttcaacaaggacaagctgaactctttcatcacccagtattctactggccaagtcagcgtggagatcgagtgggagctgcagaaggaaaacagcaagcgctggaacccggagatccagtacacttccaactattacaagtctaataatgttgaatttgctgttaatactgaaggtgtatatagtgaaccccgccccattggcaccagatacctgactcgtaatctg

SEQ ID NO: 1001 - DNA, 2208 bp, synthetic construct
  source 1..2208: mol_type = other DNA; note = Description of Artificial Sequence: Synthetic polynucleotide
atggctgccgatggttatcttccagattggctcgaggacaaccttagtgaaggaattcgcgagtggtgggctttgaaacctggagcccctcaacccaaggcaaatcaacaacatcaagacaacgctcgaggtcttgtgcttccgggttacaaataccttggacccggcaacggactcgacaagggggagccggtcaacgcagcagacgcggcggccctcgagcacgacaaggcctacgaccagcagctcaaggccggagacaacccgtacctcaagtgcaaccacgccgacgccgagttccaggagcggctcaaagaagatacgtcttttgggggcaacctcgggcgagcagtcttccaggccaaaaagaggcttcttgaacctcttggtctggttgaggaagcggctaagacggctcctggaaagaagaggcctgtagagcagtctcctcaggaaccggactcctccgcgggtattggcaaatcgggtgcacagcccgctaaaaagagactcaatttcggtcagactggcgacacagagtcagtcccagaccctcaaccaatcggagaacctcccgcagccccctcaggtgtgggatctcttacaatggcttcaggtggtggcgcaccagtggcagacaataacgaaggtgccgatggagtgggtagttcctcgggaaattggcattgcgattcccaatggctgggggacagagtcatcaccaccagcacccgaacctgggccctgcccacctacaacaatcacctctacaagcaaatctccaacagcacatctggaggatcttcaaatgacaacgcctacctcggctacagcaccccctgggggtattttgacttcaacagattccactgccacttctcaccacgtgactggcagcgactcatcaacaacaactggggattccggcctaagcgactcaacttcaagctcttcaacattcaggtcaaagaggttacggacaacaatggagtcaagaccatcgccaataaccttaccagcacggtccaggtcttcacggactcagactatcagctcccgtacgtgctcgggtcggctcacgagggctgcctcccgccgttcccagcggacgttttcatgattcctcagtacgggtatctgacgcttaatgatggaagccaggccgtgggtcgttcgtccttttactgcctggaatatttcccgtcgcaaatgctaagaacgggtaacaacttccagttcagctacgagtttgagaacgtacctttccatagcagctacgctcacagccaaagcctggaccgactaatgaatccactcatcgaccaatacttgtactatctctcaaagactattaacggttctggacagaatcaacaaacgctaaaattcagtgtggccggacccagcaacatggctgtccagggaagaaactacatacctggacccagctaccgacaacaacgtgtctcaaccactgtgactcaaaacaacaacagcgaatttgcttggcctggagcttcttcttgggctctcaatggacgtaatagcttgatgaatcctggacctgctatggccagccacaaagaaggagaggaccgtttctttcctttgtctggatctttaatttttggcaaacaaggaactggaagagacaacgtggatgcggacaaagtcatgataaccaacgaagaagaaattaaaactactaacccggtagcaacggagtcctatggacaagtggccacaaaccaccagagtgcccaagcacaggcgcagaccggctgggttcaaaaccaaggaatacttccgggtatggtttggcaggacagagatgtgtacctgcaaggacccatttgggccaaaattcctcacacggacggcaactttcacccttctccgctgatgggagggtttggaatgaagcacccgcctcctcagatcctcatcaaaaacacacctgtacctgcggatcctccaacggccttcaacaaggacaagctgaactctttcatcacccagtattctactggccaagtcagcgtggagatcgagtgggagctgcagaaggaaaacagcaagcgctggaacccggagatccagtacacttccaactattacaagtctaataatgttgaatttgctgttaatactgaaggtgtatatagtgaaccccgccccattggcaccagatacctgactcgtaatctg

SEQ ID NO: 1002 - DNA, 2208 bp, synthetic construct; identical to SEQ ID NO: 1001
  source 1..2208: mol_type = other DNA; note = Description of Artificial Sequence: Synthetic polynucleotide

SEQ ID NO: 1003 - DNA, 2208 bp, synthetic construct
  source 1..2208: mol_type = other DNA; note = Description of Artificial Sequence: Synthetic polynucleotide
atggctgccgatggttatcttccagattggctcgaggacaaccttagtgaaggaattcgcgagtggtgggctttgaaacctggagcccctcaacccaaggcaaatcaacaacatcaagacaacgctcgaggtcttgtgcttccgggttacaaataccttggacccggcaacggactcgacaagggggagccggtcaacgcagcagacgcggcggccctcgagcacgacaaggcctacgaccagcagctcaaggccggagacaacccgtacctcaagtgcaaccacgccgacgccgagttccaggagcggctcaaagaagatacgtcttttgggggcaacctcgggcgagcagtcttccaggccaaaaagaggcttcttgaacctcttggtctggttgaggaagcggctaagacggctcctggaaagaagaggcctgtagagcagtctcctcaggaaccggactcctccgcgggtattggcaaatcgggtgcacagcccgctaaaaagagactcaatttcggtcagactggcgacacagagtcagtcccagaccctcaaccaatcggagaacctcccgcagccccctcaggtgtgggatctcttacaatggcttcaggtggtggcgcaccagtggcagacaataacgaaggtgccgatggagtgggtagttcctcgggaaattggcattgcgattcccaatggctgggggacagagtcatcaccaccagcacccgaacctgggccctgcccacctacaacaatcacctctacaagcaaatctccaacagcacatctggaggatcttcaaatgacaacgcctacctcgactacagcaccccctgggggtattttgacttcaacagattccactgccacttctcaccacgtgactggcagcggctcatcaacaacaactggggattccggcctaagcgactcaacttcaagctcttcaacattcaggtcaaagaggttacggacaacaatggagtcaagaccatcgccaataaccttaccagcacggtccaggtcttcacggactcagactatcagctcccgtacgtgctcgggtcggctcacgagggctgcctcccgccgttcccagcggacgttttcatgattcctcagtacgggtatctgacgcttaatgatggaagccaggccgtgggtcgttcgtccttttactgcctggaatatttcccgtcgcaaatgctaagaacgggtaacaacttccagttcagctacgagtttgagaacgtacctttccatagcagctacgctcacagccaaagcctggaccgactaatgaatccactcatcgaccaatacttgtactatctctcaaagactattaacggttctggacagaatcaacaaacgctaaaattcagtgtggccggacccagcaacatggctgtccagggaagaaactacatacctggacccagctaccgacaacaacgtgtctcaaccactgtgactcaaaacaacaacagcgaatttgcttggcctggagcttcttcttgggctctcaatggacgtaatagcttgatgaatcctggacctgctatggccagccacaaagaaggagaggaccgtttctttcctttgtctggatctttaatttttggcaaacaaggaactggaagagacaacgtggatgcggacaaagtcatgataaccaacgaagaagaaattaaaactactaacccggtagcaacggagtcctatggacaagtggccacaaaccaccagagtgcccaagcacaggcgcagaccggctgggttcaaaaccaaggaatacttccgggtatggtttggcagggcagagatgtgtacctgcaaggacccatttgggccaaaattcctcacacggacggcaactttcacccttctccgctgatgggagggtttggaatgaagcacccgcctcctcagatcctcatcaaaaacacacctgtacctgcggatcctccaacggccttcaacaaggacaagctgaactctttcatcacccagtattctactggccaagtcagcgtggagatcgagtgggagctgcagaaggaaaacagcaagcgctggaacccggagatccagtacacttccaactattacaagtctaataatgttgaatttgctgttaatactgaaggtgtatatagtgaaccccgccccattggcaccagatacctgactcgtaatctg

SEQ ID NO: 1004 - DNA, 2208 bp, synthetic construct; identical to SEQ ID NO: 1001
  source 1..2208: mol_type = other DNA; note = Description of Artificial Sequence: Synthetic polynucleotide

SEQ ID NO: 1005 - DNA, 2208 bp, synthetic construct
  source 1..2208: mol_type = other DNA; note = Description of Artificial Sequence: Synthetic polynucleotide
atggctgccgatggttatcctccagattggctcgaggacaaccttagtgaaggaattcgcgagtggtgggctttgaaacctggagcccctcaacccaaggcaaatcaacaacatcaagacaacgctcgaggtcttgtgcttccgggttacaaataccttggacccggcaacggactcgacaagggggagccggtcaacgcagcagacgcggcggccctcgagcacgacaaggcctacgaccagcagctcaaggccggggacaacccgcacctcaagtacaaccacgccgacgccgagttccaggagcggctcaaagaagatacgtcttttgggggcaacctcgggcgagcagtcttccaggccaaaaagaggcttcttgaacctcttggtctggttgaggaagcggctaagacggctcctggaaagaagaggcccgtagagcagtctcctcaggaaccggactcctccgcgggtattggcaaatcgggtgcacagcccgctaagaagagactcaatttcggtcagactggcgacactgagtcagtcccagaccctcaaccaatcggagaacctcccgcagccccctcaggtgtgggatctcttacaatggcttcaggtggtggcgcaccagtggcagacaataacgaaggtgccgatggagtgggtagttcctcgggaaattggcattgcgattcccaatggctgggggacagagtcatcaccaccagcacccgaacctgggccctgcccacctacaacaatcacctctacaagcaaatctccaacagcacatctggaggatcttcaaatgacaacgcctacttcggctacagcaccccctgggggtattttgacttcaacagattccactgccacttctcaccacgtgactggcagcgactcatcaacaacaactggggattccggcctaagcgactcaacttcaagctcttcaacattcaggtcaaagaggttacggacaacaatggagtcaagaccatcgccaataaccttaccagcacggtccaggtcttcacggactcagactatcagctcccgtacgtgctcgggtcggctcacgagggctgcctcccgccgttcccagcggacgttttcatgattcctcagtacgggtatctgacgcttaatgatggaagccaggccgtgggtcgttcgtccttttactgcctggaatatttcccgtcgcaaatgctaagaacgggtaacaacttccagttcagctacgagtttgagaacgtacctttccatagcagctacgctcacagccaaagcctggaccgactaatgaatccactcatcgaccaatacttgtactatctctcaaagactattaacggttctggacagaatcaacaaacgctaaaattcagtgtggccggacccagcaacatggctgtccagggaagaaactacatacctggacccagctaccgacaacaacgtgtctcaaccactgtgactcaaaacaacaacagcgaatttgcttggcctggagcttcttcttgggctctcaatggacgtaatagcttgatgaatcctggacctgctatggccagccacaaagaaggagaggaccgtttctttcctttgtctggatctttaatttttggcaaacaaggaactggaagagacaacgtggatgcggacaaagtcatgataaccaacgaagaagaaattaaaactactaacccggtagcaacggagtcctatggacaagtggccacaaaccaccagagtgcccaagcacaggcgcagaccggctgggttcaaaaccaaggaatacttccgggtatggtttggcaggacagagatgtgtacctgcaaggacccatttgggccaaaattcctcacacggacggcaactttcacccttctccgctgatgggagggtttggagtgaagcacccgcctcctcagatcctcatcaaaaacacacctgtacctgcggatcctccaacggccttcaacaaggacaggctgaactctttcatcacccagtattctactggccaagtcagcgtggagatcgagtgggagctgcagaaggaaaacagcaagcgctggaacccggagatccagtacacttccaactattacaagtctaataatgttgaatttgctgttaatactgaaggtgtatatagtgaaccccgccccattggcaccagatacctgactcgtaatctg

SEQ ID NO: 1006 - DNA, 2208 bp, synthetic construct
  source 1..2208: mol_type = other DNA; note = Description of Artificial Sequence: Synthetic polynucleotide
atggctgccgatggttatcttccagattggctcgaggacaaccttagtgaaggaattcgcgagtggtgggctttgaaacctggagcccctcaacccaaggcaaatcaacaacatcaagacaacgctcgaggtcttgtgcttccgggttacaaataccttggacccggcaacggactcgacaagggggagccggtcaacgcagcagacgcggcggccctcgagcacgacaaggcctacgaccagcagctcaaggccggagacaacccgtacctcaagtacaaccacgccgacgccgagttccaggagcggctcaaagaagatacgtcttttgggggcaacctcgggcgagcagtcttccaggccaaaaagaggcttcttgaacctcttggtctggttgaggaagcggctaagacggctcctggaaagaagaggcctgtagagcagtctcctcaggaaccggactcctccgcgggtattggcaaatcgggtgcacagcccgctaaaaagagactcaatttcggtcagactggcgacacagagtcagtcccagaccctcaaccaatcggagaacctcccgcagccccctcaggtgtgggatctcttacaatggcttcaggtggtggcgcaccagtggcggacaataacgaaggtgccgatggagtgggtagttcctcgggaaattggcattgcgattcccaatggctgggggacagagtcatcaccaccagcacccgaacctgggccctgcccacctacaacaatcacctctacaagcaaatctccaacagcacatctggaggatcttcaaatgacaacgcctacttcggctacagcaccccctgggggtattttgacttcaacagattccactgccacttctcaccacgtgactggcagcgactcatcaacaacaactggggattccggcctaagcgactcaacttcaagctcttcaacattcaggtcaaagaggttacggacaacaatggagtcaagaccatcgccaataaccttaccagcacggtccaggtcttcacggactcagactatcagctcccgtacgtgctcgggtcggctcacgagggctgcctcccgccgttcccagcggacgttttcatgattcctcagtacgggtatctgacgcttaatgatggaagccaggccgtgggtcgttcgtccttttactgcctggaatatttcccgtcgcaaatgctaagaacgggtaacaacttccagttcagctacgagtttgagaacgtacctttccatagcagctacgctcacagccaaagcctggaccgactaatgaatccactcatcgaccaatacttgtactatctctcaaagactattaacggttctggacagaatcaacaaacgctaaaattcagtgtggccggacccagcaacatggctgtccagggaagaaactacatacctggacccagctaccgacaacaacgtgtctcaaccactgtgactcaaaacaacaacagcgaatttgcttggcctggagcttcttcttgggctctcaatggacgtaatagtttgatgaatcctggacctgctatggccagccacaaagaaggagaggaccgtttctttcctttgtctggatctttaatttttggcaaacaaggaactggaagagacaacgtggatgcggacaaagtcatgataaccaacgaagaagaaattaaaactactaacccggtagcaacggagtcctatggacaagtggccacaaaccaccagagtgcccaagcacaggcgcagaccggctgggttcaaaaccaaggaatacttccgggtatggtttggcaggacagagatgtgtacctgcaaggacccatttgggccaaaattcctcacacggacggcaactttcacccttctccgctgatgggagggtttggagtgaagcacccgcctcctcagatcctcatcaaaaacacacctgtacctgcggatcctccaacggccttcaacaaggacaagctgaactctttcatcacccagtattctactggccaagtcagcgtggagatcgagtgggagctgcagaaggaaaacagcaagcgctggaacccggagatccagtacacttccaactattacaagtctaataatgttgaatttgctgttaatactgaaggtgtatatagtgaaccccgccccattggcaccagatacctgactcgtaatctg

SEQ ID NO: 1007 - DNA, 2208 bp, synthetic construct
  source 1..2208: mol_type = other DNA; note = Description of Artificial Sequence: Synthetic polynucleotide
atggctgccgatggttatcttccagattggctcgaggacaaccttagtgaaggaattcgcgagtggtgggctttgaaacctggagcccctcaacccaaggcaaatcaacaacatcaagacaacgctcgaggtcttgtgcttccgggttacaaataccttggacccggcaacggactcgacaagggggagccggtcaacgcagcagacgcggcggccctcgagcacgacaaggcctacgaccagcagctcaaggccggagacaacccgtacctcaagtacaaccacgccgacgccgagttccaggagcggctcaaagaagatacgtcttttgggggcaacctcgggcgagcagtcttccaggccaaaaagaggcttcttgaacctcttggtctggttgaggaagcggctaagacggctcctggaaagaagaggcctgtagagcagtctcctcaggaaccggactcctccgcgggtattggcaaatcgggtgcacagcccgctaaaaagagactcaatttcggtcagactggcgacacagagtcagtcccagaccctcaaccaatcggagaacctcccgcagccccctcaggtgtgggatctcttacaatggcttcaggtggtggcgcaccagtggcagacaataacgaaggtgccgatggagtgggtagttcctcgggaaattggcattgcgattcccaatggctgggggacagagtcatcaccaccagcacccgaacctgggccctgcccacttacaacaatcacctctacaagcaaatctccaacagcacatctggaggatcttcaaatgacaacgcctacttcggctacagcaccccctgggggtattttgacttcaacagattccactgccacttctcaccacgtgactggcagcgactcaccaacaacaactggggattccggcctaagcgactcaacttcaagctcttcaacattcaggtcaaagaggttacggacaacaatggagtcaagaccatcgccaataaccttaccagcacggtccaggtcttcacggactcagactatcagctcccgtacgtgctcgggtcggctcacgagggctgcctcccgccgttcccagcggacgttttcatgattcctcagtacgggtatctgacgcttaatgatggaagccaggccgtgggtcgttcgtccttttactgcctggaatatatcccgtcgcaaatgctaagaacgggtaacaacttccagttcagctacgagtttgagaacgtacctttccatagcagctacgctcacagccaaagcctggaccgactaatgaatccactcatcgaccaatacttgtactatctctcaaagactattaacggttctggacagaatcaacaaacgctaaaattcagtgtggccggacccagcaacatggctgtccagggaagaaactacatacctggacccagctaccgacaacaacgtgtctcaaccactgtgactcaaaacaacaacagcgaatttgcttggcctggagcttcttcttgggctctcaatggacgtaatagcttgatgaatcctggacctgctatggccagccacaaagaaggagaggaccgtttctttcctttgtctggatctttaatttttggcaaacaaggaactggaagagacaacgtggatgcggacaaagtcatgataaccaacgaagaagaaattaaaactactaacccggtagcaacggagtcctatggacaagtggccacaaaccaccagagtgcccaagcacaggcgcagaccggctgggttcaaaaccaaggaatacttccgggtatggtttggcaggacagagatgtgtacctgcaaggacccatttgggccaaaattcctcacacggacggcaactttcacccttctccgctgatgggagggtttggagtgaagcacccgcctcctcagatcctcatcaaaaacacacctgtacctgcggatcctccaacggccttcaacaaggacaagctgaactctttcatcacccagtattctactggccaagtcagcgtggagatcgagtgggagctgcagaaggaaaacagcaagcgctggaacccggagatccagtacacttccaactattacaagtctaataatgttgaatttgctgttaatactgaaggtgtatatagtgaaccccgccccattggcaccagatacctgactcgtaatctg

SEQ ID NO: 1008 - DNA, 2208 bp, synthetic construct
  source 1..2208: mol_type = other DNA; note = Description of Artificial Sequence: Synthetic polynucleotide
atggctgccgatggttatcttccagattggctcgaggacaaccttagtgaaggaattcgcgagtggtgggctttgaaacctggagcccctcaacccaaggcaaatcaacaacatcaagacaacgctcgaggtcttgtgcttccgggttacaaataccttggacccggcaacggactcgacaagggggagccggtcaacgcagcagacgcggcggccctcgagcacgacaaggcctacgaccagcagctcaaggccggagacaacccgtacctcaagtacaaccacgccgacgccgagttccaggagcggctcaaagaagatacgtcttttgggggcaacctcgggcgagcagtcttccaggccaaaaagaggcttcttgaacctcttggtctggttgaggaagcggctaagacggctcctggaaagaagaggcctgtagagcagtctcctcaggaaccggactcctccgcgggtattggcaaatcgggtgcacagcccgctaaaaagagactcaatttcggtcagactggcgacacagagtcagtcccagaccctcaaccaatcggagaacctcccgcagccccctcaggtgtgggatctcttacaatggcttcaggtggtggcgcaccagtggcagacaataacgaaggtgccgatggagtgggtagttcctcgggaaattggcattgcgattcccaatggctgggggacagagtcatcaccaccagcacccgaacctgggccctgcccacctacaacaatcacctctacaagcaaatctccaacagcacatctggaggatcttcaaatgacaacgcctacttcggctacagcaccccctgggggtattttgacttcaacagattccactgccacttctcaccacgtgactggcagcgactcatcaacaacaactggggattccggcctaagcgactcaacttcaagctcttcaacattcaggtcaaagaggttacggacaacaatggagtcaagaccatcgccaataaccttaccagcacggtccaggtcttcacggactcagactatcagctcccgtacgtgctcgggtcggctcacgagggctgcctcccgccgttcccagcggacgttttcatgattcctcagtacgggtatctgacgcttaatgatggaagccaggccgtgggtcgttcgtccttttactgcctggaatatttcccgtcgcaaatgctaagaacgggtaacaacttccagtttagctacgagtttgagaacgtacctttccatagcagctacgctcacagccaaagcctggaccgactaatgaatccactcatcgaccaatacttgtactatctctcaaagactattaacggttctggacagaatcaacaaacgctaaaattcagtgtggccggacccagcaacatggctgtccagggaagaaactacatacctggacccagctaccgacaacaacgtgtctcaaccactgtgactcaaaacaacaacagcgaatttgcttggcctggagcttcttcttgggctctcaatggacgtaatagcttgatgaatcctggacctgctatggccagccacaaagaaggagaggaccgtttctttcctttgtctggatctttaatttctggcaaacaaggaactggaagagacaacgtggatgcgaacaaagtcatgataaccaacgaagaagaaattaaaactactaacccggtagcaacggagtcctatggacaagtggccacaaaccaccagagtgcccaagcacaggcgcagaccggctgggttcaaaaccaaggaatacttccgggtatggtttggcaggacagagatgtgtacctgcaaggacccatttgggccaaaattcctcacacggacggcaactttcacccttctccgctgatgggagggtttgaaatgaagcacccgcctcctcagatcctcatcaaaaacacacctgtacctgcggatcctccaacggccttcaacaaggacaagctgaactctttcatcacccagtattctactggccaagtcagcgtggagatcgagtgggagctgcagaaggaaaacagcaagcgctggaacccggagatccagtacacttccaactattacaagtctaataatgttgaatttgctgttaatactgaaggtgtatatagtgaaccccgccccattggcaccagatacctgactcgtaatctg

SEQ ID NO: 1009 - DNA, 2208 bp, synthetic construct
  source 1..2208: mol_type = other DNA; note = Description of Artificial Sequence: Synthetic polynucleotide
atggctgccgatggttatcttccagattggctcgaggacaaccttagtgaaggaattcgcgagtggtgggctttgaaacctggagcccctcaacccaaggcaaatcaacaacatcaagacaacgctcgaggtcttgtgcttccgggttacaaataccttggacccggcaacggactcgacaagggggagccggtcaacgcagcagacgcggcggccctcgagcacgacaaggcctacgaccagcagctcaaggccggagacaacccgtacctcaagtacaaccacgccgacgccgagttccaggagcggctcaaagaagatacgtcttttgggggcaacctcgggcgagcagtcttccaggccaaaaagaggcttcttgaacctcttggtctggttgaggaagcggctaagacggctcctggaaagaagaggcctgtagagcagtctcctcaggaaccggactcctccgcgggtattggcaaatcgggtgcacagcccgctaaaaagagactcaatttcggtcagactggcgacacagagtcagtcccagaccctcaaccaatcggagaacctcccgcagccccctcaggtgtgggatctcttacaatagcttcaggtggtggcgcaccagtggcagacaataacgaaggtgccgatggagtgggtagttcctcgggaaattggcattgcgattcccaatggctgggggacagagtcatcaccaccagcacccgaacctgggccctgcccacctacaacaatcacctctacaagcgaatctccaacagcacatctggaggatcttcaaatgacaacgcctacttcggctacagcaccccctgggggtattttgacttcaacagattccactgccacttctcaccacgtgactggcagcgactcatcaacaacaactggggattccggcctaagcgactcaacttcaagcttttcaacattcgggtcaaagaggttacggacaacaatggagtcaagaccatcaccaataaccttaccagcacggtccaggtcttcacggactcagactatcagctcccgtacgtgcttgggtcggctcacgagggctgcctcccgccgttcccagcggacgttttcatgattcctcagtacgggtatctgacgcttaatgatggaagccaggccgtgggtcgttcgtccttttactgcctggaatatttcccgtcgcaaatgctaagaacgggtaacaacttccagttcagctacgagtttgagaacgtacctttccatagcagctacgctcacagccaaagcctggaccgactaatgaatccactcatcgaccaatacttgtactatctctcaaagactattaacggttctggacagaatcaacaaacgctaaaattcagtgtggccggacccagcaacatggctgtccagggaagaaactacatacctggacccagctaccgacaacaacgtgtctcaaccactgtgactcgaaacaacaacagcgaatttgcttggcctggagcttcttcttgggctctcaatggacgtaatagcttgatgaatcctggacctgctatggccagccacaaagaaggagaggaccgtttctttcctttgtctggatctttaatttttggcaaacaaggaactggaagagacaacgtggatgcggacaaagtcatgataaccaacgaagaagaaattaaaactactaacccggtagcaacggagtcctatggacaagtggccacaaaccaccagagtgcccaagcacaggcgcagaccggctgggttcaaaaccaaggaatacttccgggtatggtttggcaggacagagatgtgtacctgcaaggacccatttgggccaaaattcctcacacggacggcaactttcacccttctccgctgatgggagggtttggagtgaagcacccgcctcctcagatcctcatcaaaaacacacctgtacctgcggatcctccaacggccttcaacaaggacaagctgaactctttcatcacccagtattctactggccaagtcagcgtggagatcgagtgggagctgcagaaggaaaacagcaagcgctggaacccggagatccagtacacttccaactattacaagtctaataatgttgaatttgctgttaatactgaaggtgtatatagtgaaccccgccccattggcaccagatacctgactcgtaatctg

SEQ ID NO: 1010 - DNA, 2208 bp, synthetic construct
  source 1..2208: mol_type = other DNA; note = Description of Artificial Sequence: Synthetic polynucleotide
atggctgccgatggttatcttccagattggctcgaggacaaccttagtgaaggaattcgcgagtggtgggctttgaaacctggagcccctcaacccaaggcaaatcaacaacatcaagacaacgctcgaggtcttgtgcttccgggttacaaataccttggacccggcaacggactcgacaagggggagccggtcaacgcagcagacgcggcggccctcgagcacgacaaggcctacgaccagcagctcaaggccggagacaacccgtacctcaagtacaaccacgccgacgccgagttccaggagcggctcaaagaagatacgtcttttgggggcaacctcgggcgagcagtcttccaggccaaaaagaggcttcttgaacctcttggtctggttgaggaagcggctaagacggctcctggaaagaagaggcctgtagagcagtctcctcaggaaccggactcctccgcgggtattggcaaatcgggcgcacagcccgctaaaaagagactcaatttcggtcagactggcgacacagagccagtcccagaccctcaaccaatcggagaacctcccgcagccccctcaggtgtgggatctcttacaatggcttcaggtggtggcgcaccagtggcagacaataacgaaggtgccgatggagtgggtagttcctcgggaaattggcattgcgattcccaatggctgggggacagagtcatcaccaccagcacccgaacctgggccctgcccacctacaacaatcacctctacaagcaaatctccaacagcacatctggaggatcttcaaatgacaacgcctacttcggctacagcaccccctgggggtattttgacttcaacagattccactgccacttctcaccacgtgactggcagcgactcatcaacaacaactggggattccggcctaagcgactcaacttcaagctcttcaacattcaggtcaaagaggttacggacaacaatggagtcaagaccatcgccaataaccttaccagcacggtccaggtcttcacggactcagactatcagctcccgtacgtgctcgggtcggctcacgagggctgcctcccgccgttcccagcgggcgttttcatgattcctcagtacgggtatctgacgcttaatgatggaagccaggccgtgggtcgttcgtccttttactgcctggaatatttcccgtcgcaaatgctaagaacgggtaacaacttccagttcagctacgagtttgagaacgtacctttccatagcagctacgctcacagccaaagcctggaccgactaatgaatccactcatcgaccaatacttgtactatctctcaaagactattaacggttctggacagaatcaacaaacgctaaaattcagtgtggccggacccagcaacatggctgtccagggaagaaactacatacctggacccagctaccgacaacaacgtgtctcaaccactgcgactcaaaacaacaacagcgaatttgcttggcctggagcttcttcttgggctctcaatggacgtaatagcttgatgaatcctggacctgctatggccagccacaaagaaggagaggaccgtttctttcctttgtctggatctttaatttttggcaaacaaggaactggaagagacaacgtggatgcggacaaagtcatgataaccaacgaagaagaaattaaaactactaacccggtagcaacggagtcctatggacaagtggccacaaaccaccagagtgcccaagcacaggcgcagaccggctgggttcaaaaccaaggaatacttccgggtatggtttggcaggacagagatgtgtacctgcaaggacccatttgggccaaaattcctcacacggacggcaactttcacccttctccgctgatgggagggtttggaatgaagcacccgcctcctcagatcctcatcaaaaacacacctgtacctgcggatcctccaacggccttcaacaaggacaagctgaactctttcatcacccagtattctactggccaagtcagcgtggagatcgagtgggagctgcagaaggaaaacagcaagcgctggaacccggagatccagtacacttccaactattacaagtctaataatgttgaatttgctgttaatactgaaggtgtatatagtgaaccccgccccattggcaccagatacctgactcgtaatctg

SEQ ID NO: 1011 - DNA, 2208 bp, synthetic construct
  source 1..2208: mol_type = other DNA; note = Description of Artificial Sequence: Synthetic polynucleotide
atggctgccgatggttatcttccagattggctcgaggacaaccttagtgaaggaattcgcgagtggtgggctttgaaacctggagcccctcaacccaaggcaaatcaacaacatcaagacaacgctcgaggtcttgtgcttccgggttacaaataccttggacccggcaacggactcgacaagggggagccggtcaacgcagcagacgcggcggccctcgagcacgacaaggcctacgaccagcagctcaaggccggagacaacccgtacctcaagtacaaccacgccgacgccgggttccaggagcggctcaaagaagatacgtcttttgggggcaacctcgggcgagcagtcttccaggccaaaaagaggcttcttgaacctcttggtctggttgaggaagcggctaagacggctcctggaaagaagaggcctgtagagcagtctcctcaggaaccggactcctccgcgggtattggcaaatcgggtgcacagcccgctaaaaagagactcaatttcggtcagactggcgacacagagtcagtcccagtccctcaaccaatcggagaacctcccgcagccccctcaggtgtgggatctcttacaatggcttcaggtggtggcgcaccagtggcagacaataacgaaggtgccgatggagtgggtagttcctcgggaaattggcattgcgattcccaatggctgggggacagagtcatcaccaccagcacccgaacctgggccctgcccacctacaacaatcacctctacaagcaaatctccaacagcacatctggaggatcttcaaatgacaacgcctacttcggctacagcaccccctgggggtattttgacttcaacagattccactgccacttctcaccacgtgactggcagcgactcatcaacaacaactggggattccggcctaagcgactcaacttcaagctcttcaacattcaggtcaaagaggttacggacaacaatggagtcaagaccatcgccaataaccttaccagcacggtccaggtcttcacggactcagactatcagctcccgtacgtgctcgggtcggctcacgagggctgcctcccgccgttcccagcggacgttttcatgattcctcagtacgggtatctgacgcttaatgatggaagccaggccgtgggtcgttcgtccttttactgcctggaatatttcccgtcgcaaatgctaagaacgggtaacaacttccagttcagctacgagtttgagaacgtacctttccatagcagctacgctcacagccaaagcctggaccgactaatgaatccactcatcgaccaatacttgtactatctctcaaagactattaacggttctggacagaatcaacaaacgctaaaattcagtgtggccggacccagcaacatggctgtccagggaagaaactacatacctggacccagctaccgacaacaacgtgtctcaaccactgtgactcaaaacaacaacagcgaatttgcttggcctggagcttcttcttgggctctcaatggacgtaatagcttgatgaatcctggacctgctatggccagccacaaagaaggagaggaccgtttctttcctttgtctggatctttaatttttggcaaacaaggagctggaagagacaacgtggatgcggacaaagtcatgataaccaacgaagaagaaattaaaactactaacccggtagcaacggagtcctatggacaagtggccacaaaccaccagagtgcccaagcacaggcgcagaccggctgggttcaaaaccaaggaatacttccgggtatggtttggcaggacagagatgtgtacctgcaaggacccatttgggccaaaattcctcacacggacggcaactttcacccttctccgctgatgggagggtttggaatgaagcacccgcctcctcagatcctcatcaaaaacacacctgtacctgcggatcctccaacggccttcaacaaggacaagctgaactctttcatcacccagtattctactggccaagtcagcgtggagatcgagtgggagctgcagaaggaaaacagcaagcgctggaacccggagatccagtacacttccaactattacaagtctaataatgttgaatttgctgttaatactgaaggtgtatatagtgaaccccgccccattggcaccagatacctgactcgtaatctg

SEQ ID NO: 1012 - DNA, 2208 bp, synthetic construct
  source 1..2208: mol_type = other DNA; note = Description of Artificial Sequence: Synthetic polynucleotide
  misc_difference 377: note = modified_base - a, c, t, g, unknown or other
atggctgccgatggttatcttccagattggctcgaggacaaccttagtgaaggaattcgcgagaggtgggctttgaaacctggagcccctcaacccaaggcaaatcaacaacatcaagacaacgctcgaggtcttgtgcttccgggttacaaataccttggacccggcaacggactcgacaagggggagccggtcaacgcagcagacgcggcggccctcgagcacgacaaggcctacgaccagcagctcaaggccggagacaacccgtacctcaagtacaaccacgccgacgccgagttccaggagcggctcaaagaagatacgtcttttgggggcaacctcgggcgagcagtcttccaggccaaaaagaggcttcntgaacctcttggtctggttgaggaagcggctaagacggctcctggaaagaagaggcctgtagagcagtctcctcaggaaccggactcctccgcgggtattggcaaatcgggtgcacagcccgctaaaaagagactcaatttcggtcagactggcgacacagagtcagtcccagaccctcaaccaatcggagaacctcccgcagccccctcaggtgtgggatctcttacaatggcttcaggtggtggcgcaccagtggcagacaataacgaaggtgccgatggagtgggtagttcctcggggaattggcattgcgattcccaatggctgggggacagagtcatcaccaccagcacccgaacctgggccctgcccacctacaacaatcacctctacaagcaaatctccaacagcacatctggaggatcttcaaatgacaacgcctacttcggctacagcaccccctgggggtattttgacttcaacagattccactgccacttctcaccacgtgactggcagcgactcatcaacaacaactggggattccggcctaagcgactcaacttcaagctcttcaacattcaggtcaaagaggttacggacaacaatggagtcaagaccatcgccaataaccttaccagcacggtccaggtcttcacggactcagactatcagctcccgtacgtgctcgggtcggctcacgagggctgcctcccgccgttcccagcggacgttttcatgattcctcagtacgggtatctgacgcttaatgatggaagccaggccgtgggtcgttcgtccttttactgcctggaatatttcccgtcgcaaatgctaagaacgggtaacaacttccagttcagctacgagtttgagaacgtacctttccatagcagctacgctcacagccaaagcccggaccgactaatgaatccactcatcgaccaatacttgtactatctctcaaagactattaacggttctggacagaatcaacaaacgctaaaattcagtgtggccggacccagcaacatggctgtccagggaagaaactacatacctggacccagctaccgacaacaacgtgtctcaaccactgtgactcaaaacaacaacagcgaatttgcttggcctggagcttcttcttgggctctcaatggacgtaatagcttgatgaatcctggacctgctatggccagccacaaagaaggagaggaccgtttctttcctttgtctggatctttaatttttggcaaacaaggaactggaagagacaacgtggatgcggacaaagtcatgataaccaacgaagaagaaattaaaactactaacccggtagcaacggagtcctatggacaagtggccacaaaccaccagagtgcccaagcacaggcgcagaccggctgggttcaaaaccaaggaatacttccgggtatggtttggcaggacagagatgtgtacctgcaaggacccatttgggccaaaattcctcacacggacggcaactttcacccttctccgctgatgggagggtttggagtgaagcacccgcctcctcagatcctcatcaaaaacacacctgtacctgcggatcctccaacggccttcaacaaggacaagctgaactctttcatcacccagtattctactggccaagtcagcgtggagatcgagtgggagctgcagaaggaaaacagcaagcgctggaacccggagatccagtacacttccaactattacaagtctaataatgttgaatttgctgttaatactgaaggtgtatatagtgaaccccgccccattggcaccagatacctgactcgtaatctg

SEQ ID NO: 1013 - DNA, 2208 bp, synthetic construct
  source 1..2208: mol_type = other DNA; note = Description of Artificial Sequence: Synthetic polynucleotide
atggctgccgatggttatcttccagattggctcgaggacaaccttagtgaaggaattcgcgagtggtgggctttgaaacctggagcccctcaacccaaggcaaatcaacaacatcaagacaacgctcgaggtcttgtgcttccgggttacaaataccttggacccggcaacggactcgacaagggggagccggtcaacgcagcagacgcggcggccctcgagcacgacaaggcctacgaccagcagctcaaggccggagacaacccgtacctcaagtacaaccacgccgacgccgagttccaggagcggctcaaagaagatacgtcttttgggggcaacctcgggcgagcagtcttccaggccaaaaagaggcttcttgaacctcttggtctggttgaggaagcggctaagacggctcctggaaagaagaggcctgtagagcagtctcctcaggaaccggactcctccgcgggtattggcaaatcgggtgcacagcccgctaaaaagagactcaatttcggtcagactggcgacacagagtcagtcccagaccctcaaccaatcggagaacctcccgcagccccctcaggtgtgggatctcttacaatggcttcaggtggtggcgcaccagtggcagacaataacgaaggtgccgatggagtgggtagttcctcgggaaattggcattgcgattcccaatggctgggggacagagtcatcaccaccagcacccgaacctgggccctgcccacctacaacaatcacctctacaagcaaatctccaacagcacatctggaggatcttcaaatgacaacgcctacctcggctacagcaccccctgggggtattttgacttcaacagattccactgccacttctcaccacgtgactggcagcgactcatcaacaacaactggggattccggcctaagcgactcaacttcaagctcttcaacattcaggtcaaagaggttacggacaacaatggagtcaagaccatcgccaataaccttaccagcacggtccaggtcttcacggactcagactatcagctcccgtacgtgctcgggtcggctcacgagggctgcctcccgccgttcccagcggacgttttcatgattcctcagtacgggtatctgacgcttaatgatggaagccaggccgtgggtcgttcgtccttttactgcctggaatatttcccgtcgcaaatgctaagaacgggtaacaacttccagttcagctacgagtttgagaacgtacctttccatagcagctacgctcacagccaaagcctggaccgactaatgaatccactcatcgaccaatacttgtactatctctcaaagactattaacggttctggacagaatcaacaaacgctaaaattcagtgtggccggacccagcaacatggctgtccagggaagaaactacatacctggacccagctaccgacaacaacgtgtctcaaccactgtgactcaaaacaacaacagcgaatttgcttggcctggagcttcttcttgggctctcaatggacgtaatagcttgatgaatcctggacctgctatggccagccacaaagaaggagaggaccgtttctttcctttgtctggatctttaatttttggcaaacaaggaactggaagagacaacgtggatgcggacaaagtcatgataaccaacgaagaagaaattaaaactactaacccggtagcaacggagtcctatggacaagtggccacaaaccaccagagtgcccaagcacaggcgcagaccggctgggttcaaaaccaaggaatacttccgggtatggtttggcaggacagagatgtgtacctgcaaggacccatttgggccaaaattcctcacacggacggcaactttcacccttctccgctgatgggagggtttggaatgaagcacccgcctcctcagatcctcatcaaaaacacacctgtacctgcggatcctccaacggccttcaacaaggacaagctgaactctttcatcacccagtattctactggccaagtcagcgtggagatcgagtgggagctgcagaaggaaaacagcaagcgctggaacccggagatccagtacacttccaactattacaagtctaataatgttgaatttgctgttaatactgaaggtgtatatagtgaaccccgccccattggcaccagatacctgactcgtaatctg

SEQ ID NO: 1014 - DNA, 2208 bp, synthetic construct
  source 1..2208: mol_type = other DNA; note = Description of Artificial Sequence: Synthetic polynucleotide
atggctgccgatggttatcttccagattggctcgaggacaaccttagtgaaggaattcgcgagtggtgggctttgaaacctggagcccctcaacccaaggcaaatcaacaacatcaagacaacgctcgaggtcttgtgcttccgggttacaaataccttggacccggcaacggactcgacaagggggagccggtcaacgcagcagacgcggcggccctcgagcacgacaaggcctacgaccagcagctcaaggccggagacaacccgtacctcaagtacaaccacgccgacgccgagttccaggagcggctcaaagaagatacgtcttttgggggcaacctcgggcgagcagtcttccaggccaaaaagaggcttcttgaacctcttggtctggttgaggaagcggctaagacggctcctggaaagaagaggcctgtagagcagtctcctcaggaaccggactcctccgcgggtattggcaaatcgggtgcacagcccgctaaaaagagactcaatttcggtcagactggcgacacagagtcagtcccagaccctcaaccaatcggagaacctcccgcagccccctcaggtgtgggatctcttacaatggcttcaggtggtggcgcaccagtggcagacaataacgaaggtgccgatggagtgggtagttcctcgggaaattggcattgcgattcccaatggctgggggacagagtcatcaccaccagcacccgaacctgggccctgcccacctacaacaatcacctctacaagcaaatctccaacagcacatctggaggatcttcaaatgacaacgcctacttcggctacagcaccccctgggggtattttgacttcaacagattccactgccacttctcaccacgtgactggcagcgactcatcaacaacaactggggattccggcctaagcgactcaacttcaagctcttcaacattcaggtcaaagaggttacggacaacaatggagtcaagaccatcgccaataaccttaccagcacggtccaggtcttcacggactcagactatcagctcccgtacgtgctcgggtcggctcacgagggctgcctcccgccgttcccagcggacgttttcatgattcctcagtacgggtatctgacgcttaatgatggaagccaggccgtgggtcgttcgtccttttactgcctggaatatttcccgtcgcaaatgctaagaacgggtaacaacttccagttcagctacgagtttgagaacgtacctttccatagcagctacgctcacagccagagcctggaccgactaatgaatccactcatcgaccaatacttgtactatctctcaaagactattaacggttctggacagaatcaacaaacgctaaaattcagtgtggccggacccagcaacatggctgtccagggaagaaactacatacctggacccagctaccgacaacaacgtgtctcaaccactgtgactcaaaacaacaacagcgaatttgcttggcctggagcttcttcttgggctctcaatggacgtaatagcttgatgaatcctggacctgctatggccagccacaaagaaggagaggaccgtttctttcctttgtctggatctttaatttttggcaaacaaggaactggaagagacaacgtggatgcggacaaagtcatgataaccaacgaagaagaaattaaaactactaacccggtagcaacggagtcctatggacaagtggccacaaaccaccagagtgcccaagcacaggcgcagaccggctgggttcaaaaccaaggaatacttccgggtatggtttggcaggacagagatgtgtacctgcaaggacccatttgggccaaaattcctcacacggacggcaactttcacccttctccgctgatgggagggtttggaatgaagcacccgcctcctcagatcctcatcaaaaacacacctgtacctgcggatcctccaacggccttcaacaaggacaagctggactctttcatcacccagtattctactggccaagtcagcgtggagatcgagtgggagctgcagaaggaaaacagcaagcgctggaacccggtgatccagtacacttccaactattacaagtctaataatgttgaatttgctgttaatactgaaggtgtatatagtgaaccccgccccattggcaccagatacctgactcgtaatctg

SEQ ID NO: 1015 - DNA, 2208 bp, synthetic construct
  source 1..2208: mol_type = other DNA; note = Description of Artificial Sequence: Synthetic polynucleotide
atggctgccgatggttatcttccagattggctcgaggacaacctctctgagggcattcgcgagtggtgggacttgaaacctggagccccgaagcccaaagccaaccagcaaaagcaggacgacggccggggtctggtgcttcctggctacaagtacctcggacccttcaacggactcgacaagggggagcccgtcaacgcggcggacgcagcggccctcgagcacgacaaggcctacgaccagcagctcaaagcgggtgacaatccgtacctgcggtataaccacgccgacgccgagtttcaggagcgtctgcaagaagatacgtcttttgggggcaacctcgggcgagcagtcttccaggccaagaagcgggttctcgaacctctcggtctggttgaggaaggcgctaagacggctcctggaaagaaacgtccggtagagcagtcgccacaagagccagactcctcctcgggcatcggcaagacaggccagcagcccgctaaaaagagactcaattttggtcagactggcgactcagagtcagtccccgatccacaacctctcggagaacctccagcaacccccgctgctgtggggcctactacaatggcttcaggcggtggcgcaccaatggcagacaataacgaaggcgtcgacggagtgggtaatgcctcaggaaattggcattgcgattccacatggctgggcgacagagtcatcaccaccagcacccgcacctgggccttgcccacctacaataaccacctctacaagcaaatctccagtgcttcaacgggggccagcaacgacaaccactacttcggctacagcaccccctgggggtattttgatttcaacagattccactgccacttttcaccacgtgactggcagcgactcatcaacaacaattggggattccggcccaagagactcaacttcaaactcttcaacatccaagtcaaggaggtcacgacgaatgatggcgttacaaccatcgctaataaccttaccagcacggttcaagtcttctcggactcggagtaccagcttccgtacgtcctcggctctgcgcaccagggctgcctccctccgttcccggcggacgtgttcatgattccgcaatacggctacctgacgctcaacaatggcagccaagccgtgggacgttcatccttttactgcctggaatatttcccttctcagatgctgagaacgggcaacaactttaccttcagctacacctttgaggaagtgcctttccacagcagctacgcgcacagccagagcctggaccggctgatgaatcctctcatcgaccaatacctgtattacctgaacagaactcaaaatcagtccggaagtgcccaaaacaaggacttgctgtttagccgtgggtctccagctggcatgtctgttcagcccaaaaactggctacctggaccctgttatcggcagcagcgcgtttctaaaacaaaaacagacaacaacaacagcaattttacctggactggtgcttcaaaatataacctcaatgggcgtgaatccatcatcaaccctggcactgctatggcctcacacaaagacgacgaagacaagttctttcccatgagcggtgtcatgatttttggaaaagagagcgccggagcttcaaacactgcattggacaatgtcatgattacagacgaagaggaaattaaagccactaaccctgtggccaccgaaagatttgggaccgtggcagtcaatttccagagcagcagcacagaccctgcgaccggagatgtgcatgctatgggagcattacctggcatggtgtggcaagatagagacgtgtacctgcagggtcccatttgggccaaaattcctcacacagatggacactttcacccgtctcctcttatgggcggctttggactcaagaacccgcctcctcagatcctcatcaaaaacacgcctgttcctgcgaatcctccggcggagttttcagccacaaagcttgcttcattcatcacccaatactccacaggacaagtgagtgtggaaattgaatgggagctgcagaaagaaaacagcaagcgctggaatcccgaagtgcagtacacatccaattatgcaaaatctgccaacgttgattttactgtggacaacaatggactttatactgagcctcgccccattggcacccgttaccttacccgtcccctg

SEQ ID NO: 1016 - DNA, 2208 bp, synthetic construct
  source 1..2208: mol_type = other DNA; note = Description of Artificial Sequence: Synthetic polynucleotide
atggctgccgatggttatcttccagattggctcgaggacaacctctctgagggcattcgcgagtggtgggacttgaaacctggagccccgaagcccaaagccaaccagcaaaagcaggacgacggccggggtctggtgcttcctggctacaagtacctcggacccttcaacggactcgacaagggggagcccgtcaacgcggcggacgcagcggccctcgagcacgacaaggcctacgaccagcagctcaaagcgggtgacaatccgtacctgcggtataaccacgccgacgccgagtttcaggagcgtctgcaagaagatacgtcttttgggggcaacctcgggcgagcagtcttccaggccaagaagcgggttctcgaacctctcggtctggttgaggaaggcgctaagacggctcctggaaagagacgtccggtagagcagtcgccacaagagccagactcctcctcgggcatcggcaagacaggccagcagcccgctaaaaagagactcaattttggtcagactggcgactcagagtcagtccccgatccacaacctctcggagaacctccagcaacccccgctgctgtgggacctactacaatggcttcaggcggtggcgcaccaatggcagacaataacgaaggcgccgacggagtgggtaatgcctcaggaaattggcattgcgattccacatggctgggcgacagagtcatcaccaccagcacccgcacctgggccttgcccacctacaataaccacctctacaagcaaatctccagtgcttcaacgggggccagcaacgacaaccactacttcggctacagcaccccctgggggtattttgatttcaacagattccactgccacttttcaccacgtgactggcagcgactcatcaacaacaattggggattccggcccaagagactcaacttcaaactcttcaacatccaagtcaaggaggtcacgacgaatgatggcgtcacaaccatcgctaataaccttaccagcacggttcaagtcttctcggactcggagtaccagcttccgtacgtcctcggctctgcgcaccagggctgcctccctccgttcccggcggacgtgttcatgattccgcaatacggctacctgacgctcaacaatggcagccaagccgtgggacgttcatccttttactgcctggaatatttcccttctcagatgctgagaacgggcaacaactttaccttcagctacacctttgaggaagtgcctttccacagcagctacgcgcacagccagagcctggaccggctgatgaatcctctcatcgaccaatacctgtattacctgaacagaactcaaaatcagtccggaagtgcccaaaacaaggacttgctgtttagccgtgggtctccagctggcatgtctgttcagcccaaaaactggctacctggaccctgttatcggcagcagcgcgtttctaaaacaaaaacagacaacaacaacagcaattttacctggactggtgcttcaaaatataacctcaatgggcgtgaatccatcatcaaccctggcactgctatggcctcacacaaagacgacgaagacaagttctttcccatgagcggtgtcatgatttttggaaaagagagcgccggagcttcaaacactgcattggacaatgtcatgattacagacgaagaggaaattaaagccactaaccctgtggccaccgaaagatttgggaccgtggcagtcaatttccagagcagcagcacagaccctgcgaccggagatgtgcatgctatgggagcattacctggcatggtgtggcaagatagagacgtgtacctgcagggtcccatttgggccaaaattcctcacacagatggacactttcacccgtctcctcttatgggcggctttggactcaagaacccgcctcctcagatcctcatcaaaaacacgcctgttcctgcgaatcctccggcggagttttcagctacaaagtttgcttcgttcatcacccaatactccacaggacaagtgagtgtggaaattgaatgggagctgcagaaagaaaacagcaagcgctggaatcccgaagtgcagtacacatccaattatgcaaaatctgccaacgttgattttactgtggacaacaatggactttatactgagcctcgccccattggcacccgttaccttacccgtcccctg

SEQ ID NO: 1017 - DNA, 2208 bp, synthetic construct
  source 1..2208: mol_type = other DNA; note = Description of Artificial Sequence: Synthetic polynucleotide
atggctgccgatggttatcttccagattggctcgaggacaacctctctgagggcattcgcgagtggtgggacttgaaacctggagccccgaagcccaaagccaaccagcaaaagcaggacgacggccggggtctggtgcttcctggctacaagtacctcggacccttcaacggactcgacaagggggagcccgtcaacgcggcggacgcagcggccctcgagcacgacaaggcctacgaccagcagctcaaagcgggtgacaatccgtacccgcggtataaccacgccgacgccgagtttcaggagcgtctgcaagaagatacgtcttttgggggcaacctcgggcgagcagtcttccaggccaagaagcgggttctcgaacctctcggtctggttggggaaggcgctaagacggctcctggaaagaaacgtccggtagagcagtcgccacaagagccagactcctcctcgggcatcggcaagacaggccagcagcccgctaaaaagagactcaattttggtcagactggcgactcagagtcagtccccgatccacaacctctcggagaacctccagcaacccccgctgctgtgggacctactacaatggcttcaggcggtggcgcaccaatggcagacaataacgaaggcgccgacggagtgggtaatgcctcaggaaattggcattgcgattccacatggctgggcgacagagtcatcaccaccagcacccgcacctgggccttgcccacctacaataaccacctctacaagcaaatctccagtgcttcaacgggggccagcaacgacaaccactacttcggctacagcaccccctgggggtattttgatttcaacagattccactgccacttttcaccacgtgactggcagcgactcatcaacaacaattggggattccggcccaagagactcaacttcaaactcttcaacatccaagtcaaggaggtcacgacgaatgatggcgtcacaaccatcgctaataaccttaccagcacggttcaagtcttctcggactcggagtaccagcttccgtacgtcctcggctctgcgcaccagggctgcctccctccgttcccggcggacgtgttcatgattccgcaatacggctacctgacgctcaacaatggcagccaagccgtgggacgttcatccttttactgcctggaatatttcccttctcagatgctgagaacgggcaacaactttaccttcagctacacctttgaggaagtgcctttccacagcagctacgcgcacagccagagcctggaccggctgatgaatcctcccatcgaccaatacctgtattacctgaacagaactcaaaatcagtccggaagtgcccaaaacaaggacttgctgtttagccgtgggtctccagctggcatgtctgttcagcccaaaaactggctacctggaccctgttatcggcagcagcgcgtttctaaaacaaaaacagacaacaacaacagcaattttacctggactggtgcttcaaaatataacctcaatgggcgtgaatccatcatcaaccctggcactgctatggcctcacacaaagacgacgaagacaagttctttcccatgagcggtgtcatgatttttggaaaagagagcgccggagcttcaaacactgcattggacaatgtcatgattacagacgaagaggaaattaaagccactaaccctgtggccaccgaaagatttgggaccgtggcagtcaatttccagagcagcagcacagaccctgcgaccggagatgtgcatgctatgggagcattacctggcatggtgtggcaagatagagacgtgtacctgcagggtcccatttgggccaaaattcctcacacagatggacactttcacccgtctcctcttatgggcggctttggactcaagaacccgcctcctcagatcctcatcaaaaacacgcctgttcctgcgaatcctccggcggagttttcagctacaaagtttgcttcattcatcacccaatactccacaggacaagtgagtgtggaaattgaatgggagctgcagaaagaaaacagcaagcgctggaatcccgaagtgcagtacacatccaattatgcaaaatctgccaacgttgattttactgtggacaacaatggactttatactgagcctcgccccattggcacccgttaccttacccgtcccctg

SEQ ID NO: 1018 - DNA, 2208 bp, synthetic construct
  source 1..2208: mol_type = other DNA; note = Description of Artificial Sequence: Synthetic polynucleotide
atggctgccgatggttatcttccagattggctcgaggacaacctctctgagggcattcgcgagtggtgggacttgaaacctggagccccgaagcccaaagccaaccagcaaaagcaggacgacggccggggtctggtgcttcctggctacaagtacctcggacccttcaacggactcgacaagggggagcccgtcaacgcggcggacgcagcggccctcgagcacgacaaggcctacgaccagcagctcaaagcgggtgacaatccgtacctgcggtataaccacgccgacgccgagtttcaggagcgtctgcaagaagatacgtcttttgggggcaacctcgggcgagcagtcttccaggccaagaagcgggttctcgaacctctcggtctggttgaggaaggcgctaagacggctcctggaaagaaacgtccggtagagcagtcgccacaagagccagactcctcctcgggcatcggcaagacaggccagcagcccgctaaaaagagactcaattttggtcagactggcgactcagagtcagtccccgatccacgacctctcggagaacctccagcaacccccgctgctgtgggacctactacaatggcttcaggcggtggcgcaccaatggcagacaataacgaaggcgccgacggagtgggtaatgcctcaggaaattggcattgcgattccacatggctgggcgacagagtcatcaccaccagcacccgcacctgggccttgcccacctacaataaccacctctacaagcaaatctccagtgcttcaacgggggccagcaacgacaaccactacttcggctacagcaccccctgggggtattttgatttcaacagattccactgccacttttcaccacgcgactggcagcgactcatcaacaacaattggggattccggcccaagagactcaacttcaaactcttcaacatccaagtcaaggaggtcacgacgaatgatggcgtcacaaccatcgctaataaccttaccagcacggttcaagtcttctcggactcggagtaccagcttccgtacgtcctcggctctgcgcaccagggctgcctccctccgttcccggcggacgtgttcatgattccgcaatacggctacctgacgctcaacaatggcagccaagccgtgggacgttcatccttttactgcctggaatatttcccttctcagatgctgagaacgggcaacaactttaccttcagctacacctttgaggaagtgcctttccacagcagctacgcgcacagccagagcctggaccggctgatgaatcctctcatcgaccaatacctgtattacctgaacagaactcaaaatcagtccggaagtgcccaaaacaaggacttgctgtttagccgtgggcctccagctggcatgtctgttcagcccaaaaactggctacctggaccctgttatcggcagcagcgcgtttctaaaacaaaaacagacaacaacaacagcaattttacctggactggtgcttcaaaatataacctcaatgggcgtgaatccatcatcaaccctggcactgctatggcctcacacaaagacgacgaagacaagttctttcccatgagcggtgtcatgatttttggaaaagagagcgccggagcttcaaacactgcattggacaatgtcatgattacggacgaagaggaaattaaagccactaaccctgtggccaccgaaagatttgggaccgtggcagtcaatttccagagcagcagcacagaccctgcgaccggagatgtgcatgctatgggagcattacctggcatggtgtggcaagatagagacgtgtacctgcagggtcccatttgggccaaaattcctcacacagatggacactttcacccgtctcctcttatgggcggctttggactcaagaacccgcctcctcagatcctcatcaaaaacacgcctgttcctgcgaatcctccggcggagttttcagctacaaagtttgcttcattcatcacccaatactccacaggacaagtgagtgtggaaattgaatgggagctgcagaaagaaaacagcaagcgctggaatcccgaagtgcagtacacatccaattatgcaaaatctgccaacgttgattttactgtggacaacaatggactttatactgagcctcgccccattggcacccgttaccttacccgtcccctg

SEQ ID NO: 1019 - DNA, 2208 bp, synthetic construct
  source 1..2208: mol_type = other DNA; note = Description of Artificial Sequence: Synthetic polynucleotide
atggctgccgatggttatcttccagattggctcgaggacaacctctctgagggcattcgcgagtggtgggacttgaaacctggagccccgaagcccaaagccaaccagcaaaagcaggacgacggccggggtctggtgcttcctggctacaagtacctcggacccttcaacggactcgacaagggggagcccgtcaacgcggcggacgcagcggccctcgagcacgacaaggcctacgaccagcagctcaaagcgggtgacaatccgtacctgcggtataaccacgccgacgccgagtttcaggagcgtctgcaagaagatacgtcttttgggggcaacctcgggcgagcagtcttccaggccaagaagcgggttctcgaacctctcggtctggttgaggaaggcgctaagacggctcctggaaagaaacgtccggtagagcagtcgccacaagagccagactcctcctcgggcatcggcaagacaggccagcagcccgctaaaaagagactcaattttggtcagactggcggctcagagtcagtccccgatccacaacctctcggagaacctccagcaacccccgctgctgtgggacctactacaatggcttcaggcggtggcgcaccaatggcagacaataacgaaggcgccgacggagtgggtaatgcctcaggaaattggcattgcgattccacatggctgggcgacagagtcatcaccaccagcacccgcacctgggccttgcccacctacaataaccacctctacaagcaaatctccagtgcttcaacgggggccagcaacgacaaccactacttcggctacagcaccccctgggggtattttgatttcaacagattccactgccacttttcaccacgtgactggcagcgactcatcaacaacaattggggattccggcccaagagactcaacttcaaactcttcaacatccaagtcaaggaggtcacgacgaatgatggcgtcacaaccatcgctaataaccttaccagcacggttcaagtcttctcggactcggagtaccagcttccgtacgtcctcggctctgcgcaccagggctgcctccctccgttcccggcggacgtgttcatgattccgcaatacggctacctgacgctcaacaatggcagccaagccgtgggacgttcatccttttactgcctggaatatttcccttctcagatgctgagaacgggcaacaactttaccttcagctacacctttgaggaagtgcctttccacagcagctacgcgcacagccagagcctggaccggctgatgaatcctcccatcgaccaatacctgtattacctgaacagaactcaaaatcagtccgggagtgcccaaaacaaggacttgctgtttagccgtgggtctccagctggcatgtctgttcagcccaaaaactggctacctggaccctgttatcggcagcagcgcgtttctaaaacaaaaacagacaacaacaacagcaattttacctggactggtgcttcaaaatataacctcaatgggcgtgaatccatcatcaaccctggcactgctatggcctcacacaaagacgacgaagacaagttctttcccatgagcggtgtcatgatttttggaaaagagagcgccggagcttcaaacactgcattggacaatgtcatgattacagacgaagaggaaattaaagccactaaccctgtggccaccgaaagatttgggaccgtggcagtcaatttccagagcagcagcacagaccctgcgaccggagatgtgcatgctatgggagcattacctggcatggtgtggcaagatagagacgtgtacctgcagggtcccatttgggccaaaattcctcacacagatggacactttcacccgtctcctcttatgggcggctttggactcaagaacccgcctcctcagatcctcatcaaaaacacgcctgttcctgcgaatcctccggcggagttttcagctacaaagtttgcttcattcatcacccaatactccacaggacaagtgagtgtggaaattgaatgggagctgcagaaagaaaacagcaagcgctggaatcccgaagtgcagtacacatccaattatgcaaaatctgccaacgttgactttactgtggacaacaatggactttatactgagcctcgccccattggcacccgttaccttacccgtcccctg

SEQ ID NO: 1020 - DNA, 2208 bp, synthetic construct
  source 1..2208: mol_type = other DNA; note = Description of Artificial Sequence: Synthetic polynucleotide
atggctgccgatggttatcttccagattggctcgaggacaacctctctgagggcattcgcgagtggtgggacttgaaacctggagccccgaagcccaaagccaaccagcaaaagcaggacgacggccggggtctggtgcttcctggctacaagtacctcggacccttcaacggactcgacaagggggagcccgtcaacgcggcggacgcagcggccctcgagcacgacaaggcctacgaccagcagctcaaagcgggtgacaatccgtacctgcggtataaccacgccgacgccgagtttcaagagcgtctgcaagaagatacgtcttttgggggcaacctcgggcgagcagtcttccaggccaagaagcgggttctcgaacctctcggtctggttgaggaaggcgctaagacggctcctggaaagaaacgtccggtagagcagtcgccacaagagccagactcctcctcgggcatcggcaagacaggccagcagcccgctaaaaagagactcaattttggtcagactggcgactcagagtcagtccccgatccgcaacctctcggagaacctccagcaacccccgctgctgtgggacctactacaatggcttcaggcggtggcgcaccaatggcagacaataacgaaggcgccgacggagtgggtaatgcctcaggaaattggcattgcgattccacatggctgggcgacagagtcatcaccaccagcacccgcacctgggccttgcccacctacaataaccacctctacaagcaaatctccagtgcttcaacgggggccagcaacgacaaccactacttcggctacagcaccccctgggggtattttgatttcaacagattccactgccacttttcaccacgtgactggcagcgactcatcaacaacaattggggattccggcccaagagactcaacttcaaactcttcaacatccaagtcaaggaggtcacgacgaatgatggcgtcacaaccatcgctaataaccttaccagcacggttcaagtcttctcggactcggagtaccagcttccgtacgtcctcggctctgcgcaccagggctgcctccctccgttcccggcggacgtgttcatgattccgcaatacggctacctgacgctcaacaatggcagccaagccgtgggacgttcatccttttactgcctggaatatttcccttctcagatgctgagaacgggcaacaactttaccttcagctacacctttgaggaagtgcctttccacagcagctacgcgcacagccagagcctggaccggctgatgaatcctctcatcgaccaatacctgtattacctgaacagaactcaaaatcagtccggaagtgcccaaaacaaggacttgctgtttagccgtgggtctccagctggcatgtctgttcagcccaaaaactggctacctggaccctgttatcggcagcagcgcgtttctaaaacaaaaacagacaacaacaacagcaattttacctggactggtgcttcaaaatataacctcaatgggcgtgaatccatcatcaaccctggcactgctgtggcctcacacaaagacgacgaagacaagttctttcccatgagcggtgtcatgatttttggaaaagagagcgccggagcttcaaacactgcattggacaatgtcatgattacagacgaagaggaaattaaagccactaaccctgtggccaccgaaagatttgggaccgtggcagtcaatttccagagcagcagcacagaccctgcgaccggagatgtgcatgctatgggagcattacctggcatggtgtggcaagatagagacgtgtacctgcagggtcccatttgggccaaaattcctcacacagatggacactttcacccgtctcctcttatgggcggctttggactcaagaacccgcctcctcagatcctcatcaaaaacacgcctgttcctgcgaatcctccggcggagttttcagctacaaagtttgcttcattcatcacccaatactccacaggacaagtgagtgtggaaattgaatgggagctgcagaaagaaaacagcaagcgctggaatcccgaagtgcagtacacatccaattatgcaaaatctgccaacgttgattttactgtggacaacaatggactttatactgagcctcgccccattggcacccgttaccttacccgtcccctg

SEQ ID NO: 1021 - DNA, 2208 bp, synthetic construct
  source 1..2208: mol_type = other DNA; note = Description of Artificial Sequence: Synthetic polynucleotide
atggctgccgatggttatcttccagattggctcgaggacaacctctctgagggcattcgcgagtggtgggacttgaaacctggagccccgaagcccaaagccaaccagcaaaagcaggacgacggccggggtctggtgcttcctggctacaagtacctcggacccttcaacggactcgacaagggggagcccgtcaacgcggcggacgcagcggccctcgagcacgacaaggcctacgaccagcagctcaaagcgggtgacaatccgtacctgcggtataaccacgccgacgccgagtttcaggagcgtctgcaagaagatacgtcttttgggggcaacctcgggcgagcagtcttccaggccaagaagcgggttctcgaacctctcggtctggttgaggaaggcgctaagacggctcctggaaagaaacgtccggtagagcagtcgccacaagagccagactcctcctcgggcatcggcaagacaggccagcagcccgctaaaaagagactcaattttggtcagactggcgactcagagtcagtccccgatccacaacctctcggagaacctccagcaacccccgctgctgtgggacctactacaatggcttcaggcggtggcgcaccaatggcagacaataacgaaggcgccgacggagtgggtaatgcctcaggaaattggcattgcgattccacatggctgggcgacagagtcatcaccaccagcacccgcacctgggccttgcccacctacaataaccacctctacaagcaaatctccagtgcttcaacgggggccagcaacgacaaccactacttcggctacagcaccccctgggggtattttgatttcaacagattccactgccacttttcaccacgtgactggcagcaactcatcaacaacaattggggattccggcccaagagactcaacttcaaactcttcaacatccaagtcaaggaggtcacgacgaatgatggcgtcacaaccatcgctaataaccttaccagcacggttcaagtcttctcggactcggagtaccagcttccgtacgtcctcggctctgcgcaccagggctgcctccctccgttcccggcggacgtgttcatgattccgcaatacggctacctgacgctcaacaatggcagccaagccgtgggacgttcatccttttactgcctggaatatttcccttctcagatgctgagaacgggcaacaactttaccttcagctacacctttgaggaagtgcctttccacagcagctacgcgcacagccagagcctggaccggctgatgaatcctctcatcgaccaatacctgtattacctgaacagaactcaaaatcagtccggaagtgcccaaaacaaggacttgctgtttagccgtgggtctccagctggcatgtctgttcagcccaaaaactggctacctggaccctgttatcggcagcagcgcgtttctaaaacaaaaacagacaacaacaacagcaattttacctggactggtgcttcaaaatataacctcaatgggcgtgaatccatcatcaaccctggcactgctatggcctcacacaaagacgacgaagacaagttctttcccatgagcggtgtcatgatttttggaaaagagagcgccggagcttcaaacactgcattggacaatgtcatgattacagacgaagaggaaattaaagccactaaccctgtggccaccgaaagatttgggaccgtggcagtcaatttccagagcaccagcacagaccctgcgaccggagatgtgcatgctatgggagcattacctggcatggtgtggcaagatagagacgtgtacctgcagggtcccatttgggccaaaattcctcacacagatggacactttcacccgtctcctcttatgggcggctttggactcaagaacccgcctcctcagatcctcatcaaaaacacgcctgttcctgcgaatcctccggcggagttttcagctacaaagtttgcttcattcatcacccaatactccacaggacaagtgagtgtggaaattgaatgggagctgcagaaagaaaacagcaagcgctggaatcccgaagtgcagtacacatccaattatgcaaaatctgccgacgttgattttactgtggacaacaatggactttatactgagcctcgccccattggcacccgttaccttacccgtcccctg

SEQ ID NO: 1022 - DNA, 2208 bp, synthetic construct
  source 1..2208: mol_type = other DNA; note = Description of Artificial Sequence: Synthetic polynucleotide
atggctgccgatggttatcttccagattggctcgaggacaacctctctgagggcattcgcgagtggtgggacttgaaacctggagccccgaagcccaaagccaaccagcaaaagcaggacgacggccggggtctggtgcttcctggctacaagtacctcggacccttcaacggactcgacaagggggagcccgtcaacgcggcggacgcagcggccctcgagcacgacaaggcctacgaccagcagctcaaagcgggtgacaatccgtacctgcggtataaccacgccgacgccgagtttcaagagcgtctgcaagaagatacgtcttttgggggcaacctcgggcgagcagtcttccaggccaagaagcgggttctcgaacctctcggtctggttgaggaaggcgctaagacggctcctggaaagaaacgtccggtagagcagtcgccacaagagccagactcctcctcgggcatcggcaagacaggccagcagcccgctaaaaagagactcaattttggtcagactggcgactcagagtcagtccccgatccgcaacctctcggagaacctccagcaacccccgctgctgtgggacctactacaatggcttcaggcggtggcgcaccaatggcagacaataacgaaggcgccgacggagtgggtaatgcctcaggaaattggcattgcgattccacatggctgggcgacagagtcatcaccaccagcacccgcacctgggccttgcccacctacaataaccacctctacaagcaaatctccagtgcttcaacgggggccagcaacgacaaccactacttcggctacagcaccccctgggggtattttgatttcaacagattccactgccacttttcaccacgtgactggcagcgactcatcaacaacaattggggattccggcccaagagactcaacttcaaactcttcaacatccaagtcaaggaggtcacgacgaatgatggcgtcacaaccatcgctaataaccttaccagcacggttcaagtcttctcggactcggagtaccagcctccgtacgtcctcggctctgcgcaccagggctgcctccctccgttcccggcggacgtgttcatgattccgcaatacggccacctgacgctcaacaatggcagccaagccgtgggacgttcatccttttactgcctggaatatttcccttctcagatgctgagaacgggcaacaactttaccttcagctacacctttgaggaagtgcctttccacagcagctacgcgcacagccagagcctggaccggctgacgaatcctctcatcgaccaatacctgtattacctgaacagaactcaaaatcagtccggaagtgcccaaaacaaggacttgctgtttagccgtgggtctccagctggcatgtctgttcagcccaaaaactggctacctggaccctgttatcggcagcagcgcgtttctaaaacaaaaacagacaacaacaacagcaattttacctggactggtgcttcaaaatataacctcaatgggcgtgaatccatcatcaaccctggcactgctatggcctcacacaaagacgacgaagacaagttctttcccatgagcggtgtcatgatttttggaaaagagagcgccggagcttcaaacactgcattggacaatgtcatgattacagacgaagaggaaattaaagccactaaccctgtggccaccgaaagatttgggaccgtggcagtcaatttccagagcagcagcacagaccctgcgaccggagatgtgcatgctatgggagcattacctggcatggtgtggcaagatagagacgtgtacctgcagggtcccatttgggccaaaattcctcacacagatggacactttcacccgtctcctcttatgggcggctttggactcaagaacccgcctcctcagatcctcatcaaaaacacgcctgttcctgcgaatcctccggcggagttttcagctacaaagtttgcttcattcatcacccaatactccacaggacaagtgagtgtggaaattgaatgggagctgcagaaagaaaacagcaagcgctggaatcccgaagtgcagtacacatccaattatgcaaaatctgccaacgttgattttactgtggacaacaatggactttatactgagcctcgccccattggcacccgttaccttacccgtcccctg

SEQ ID NO: 1023 - DNA, 2208 bp, synthetic construct
  source 1..2208: mol_type = other DNA; note = Description of Artificial Sequence: Synthetic polynucleotide
atggctgccgatggttatcttccagattggctcgaggacaacctctctgagggcattcgcgagtggtgggacttgaaacctggagccccgaagcccaaagccaaccagcaagagcaggacgacggccggggtctggtgcttcctggctacaagtacctcggacccttcaacggactcgacaagggggagcccgtcaacgcggcggacgcagcggccctcgagcacgacaaggcctacgaccagcagctcaaagcgggtgacaatccgtacctgcggtataaccacgccgacgccgagtttcaggagcgtctgcaagaagatacgtcttttgggggcaacctcgggcgagcagtcttccaggccaagaagcgggttctcgaacctctcggtctggttgaggaaggcgctaagacggctcctggaaagaaacgtccggtagagcagtcgccacaagagccagactcctcctcgggcatcggcaagacaggccagcagcccgctaaaaagagactcaattttggtcagactggcgactcagagtcagtccccgatccacaacctctcggagaacctccagcaacccccgctgctgtgggacctactacaatggcttcaggcggtggcgcaccaatggcagacaataacgaaggcgccgacggagtgggtaatgcctcaggaaattggcattgcgattccacatggctgggcgacagagtcatcaccaccagcacccgcacctgggccttgcccacctacaataaccacctctacaagcaaatctccagtgcttcaacgggggccagcaacgacaaccactacttcggctacagcaccccctgggggtattttgatttcaacagattccactgccacttttcaccacgtgactggcagcgactcatcaacaacaattggggattccggcccaagagactcaacttcaaactcttcaacatccaagtcaaggaggtcacgacgaatgatggcgtcacaaccatcgctaataaccttaccagcacggttcaagtcttctcggactcggagtaccagcttccgtacgtcctcggctctgcgcaccagggctgcctccctccgttcccggcggacgtgttcatgattccgcaatacggctacctgacgctcaacaatggcagccaagccgtgggacgttcatccttttactgcctggaatatttcccttctcagatgctgagaacgggcaacaactttaccttcagctacacctttgaggaagtgcctttccacagcagctacgcgcacagccagagcctggaccggctgatgaatcctctcatcgaccaatacctgtattacctgaacagaactcaaaatcagtccggaagtgcccaaaacaaggacttgctgtttagccgtgggtctccagctggcatgtctgttcagcccaaaaactggctacctggaccctgttatcggcagcagcgcgtttctaaaacaaaaacagacaacaacaacagcaattttacctggactggtgcttcaaaatataacctcaatgggcgtgaatccatcatcaaccctggcactgctatggcctcacacaaagacgacgaagacaagttctttcccatgagcggtgtcatgatttttggaaaagagagcgccggagcttcaaacactgcattggacaatgtcatgattacagacgaagaggaaattaaagccactaaccctgtggccaccgaaagatttgggaccgtggcagtcaatttccagagcagcagcacagaccctgcgaccggagatgtgcatgctacgggaacattacctggcatggtgtggcaagatagagacgtgtacctgcagggtcccatttgggccaaaattcctcacacagatggacactttcacccgtctcctcttatgggcggctttggactcaagaacccgcctcctcagatcctcatcaaaaccacgcctgttcctgcgaatcctccggcggagttttcagctacaaagtttgcttcattcatcacccagtactccacaggacaagtgagtgtggaaattgaatgggagctgcagaaagaaaacagcaagcgctggaatcccgaagtgcagtacacatccaattatgcaaaatctgccaacgttgattttactgtggacgacaatggactttatactgagcctcgccccattggcacccgttaccttacccgtcccctg

SEQ ID NO: 1024 - DNA, 2208 bp, synthetic construct
  source 1..2208: mol_type = other DNA; note = Description of Artificial Sequence: Synthetic polynucleotide
atggctgccgatggttatcttccagattggctcgaggacaacctctctgagggcattcgcgagtggtgggacttgaaacctggagccccgaagcccaaagccaaccagcaaaagcaggacgacggccggggtctggtgcttcctggctacaagtacctcggacccttcaacggactcgacaagggggagcccgtcaacgcggcggacgcagcggccctcgagcacgacaaggcctacgaccagcagctcaaagcgggtgacaatccgtacctgcggtataaccacgccgacgccgagtttcaggagcgtctgcaagaagatacgtcttttgggggcaacctcgggcgagcagtcttccaggccaagaagcgggttctcgaacctctcggtctggttgaggaaggcgctaagacggctcctggaaagaaacgtccggtagagcagtcgctacaagagccagactcctcctcgggcatcggcaagacaggccagcagcccgctaaaaagagactcaattttggtcagactggcgactcagagtcagtccccgatccacaacctctcggagaacctccagcaacccccgctgctgtgggacctactacaatggcttcaggcggtggcgcaccaatggcagacaataacgaaggcgccgacggagtgggtaatgcctcaggaaattggcattgcgattccacatggctgggcgacagagtcatcaccaccagcacccgcacctgggccttgcccacctacaataaccacctctacaagcaaatctccagtgcttcaacgggggccagcaacgacaaccactacttcggctacagcaccccctgggggtattttgatttcaacagattccactgccacttttcaccacgtgactggcagcgactcatcaacaacaattggggattccggcccaagagactcaacttcaaactcttcaacatccaagtcaaggaggtcacgacgaatgatggcgtcacaaccatcgctaataaccttaccagcacggttcaagtcttctcggactcggagtaccagcttccgtacgtcctcggctctgcgcaccagggctgcctccctccgttcccggcggacgtgttcatgattccgcaatacggctacctgacgctcaacaatggcagccaagccgtgggacgttcatccttttactgcctggaatatttcccttctcagatgctgagaacgggcaacaactttaccttcagctacacctttgaggaagtgcctttccacagcagctacgcgcacagccagagcctggaccggctgatgaatcctctcatcgaccaatacctgtattacctgaacagaactcaaaatcagtccggaagtgcccaaaacaaggacttgctgtttagccgtgggtctccagctggcatgtctgttcagcccaaaaactggctacctggaccctgttatcggcagcagcgcgtttctaaaacaaaaacagacaacgacaacagcaattttacctggactggtgcttcaaaatataacctcaatgggcgtgaatccatcatcaaccctggcactgctatggcctcacacaaagacgacgaagacaagttctttcccatgagcggtgtcatgatttttggaaaagagagcgccggagcttcaaacactgcattggacaatgtcatgattacagacgaagaggaaattaaagccactaaccctgtggccaccgaaagatttgggaccgtggcagtcaatttccagagcagcagcacagaccctgcgaccggagatgtgcatgctatgggagcattacctggcatggtgtggcaagatagagacgtgtacctgcagggtcccatttgggccaaaattcctcacacagatggacactttcacccgtctcctcttatgggcggctttggactcaagaacccgcctcctcagatcctcatcaaaaacacgcctgttcctgcgaatcctccggcggagttttcagctacaaagtttgcttcattcatcacccaatactccacaggacaagtgagtgtggaaattgaatgggagctgcagaaagaaaacagcaagcgctggaatcccgaagtgcagtacacatccaattatgcaaaatctgccaacgttgattttactgtggacaacaatggactttatactgagcctcgccccattggcacccgttaccttacccgtcccctg

SEQ ID NO: 1025 - DNA, 2208 bp, synthetic construct
  source 1..2208: mol_type = other DNA; note = Description of Artificial Sequence: Synthetic polynucleotide
atggctgccgatggttatcttccagattggctcgaggacaacctctctgagggcattcgcgagtggtgggacttgaaacctggagctccgaagcccaaagccaaccagcaaaagcaggacgacggccggggtctggtgcttcctggctacaagtacctcggacccttcaacggactcgacaagggggagcccgtcaacgcggcggacgcagcggccctcgagcacgacaaggcctacgaccagcagctcaaagcgggtgacaatccgtacctgcggtataaccacgccgacgccgagtttcaggagcgtctgcaagaagatacgtcttttgggggcaacctcgggcgagcagtcttccaggccaagaagcgggttctcgaacctctcggtctggttgaggaaggcgctaagacggctcctggaaagaaacgtccggtagagcagtcgccacaagagccagactcctcctcgggcatcggcaagacaggccagcagcccgctaaaaagagactcaattttggtcagactggcgactcagagtcagtccccgatccacaacctctcggagaacctccagcaacccccgctgctgtgggacctactacaatggcttcaggcggtggcgcaccaatggcagacaataacgaaggcgccgacggagtgggtaatgcctcaggaaattggcattgcgattccacatggctgggcgacagagtcatcaccaccagcacccgcacctgggccttgcccacctacaataaccacctctacaagcaaatctccagtgcttcaacgggggccagcaacgacaaccactacttcggctacagcaccccctgggggtattttgatttcaacagattccactgccacttttcaccacgtgactggcagcgactcatcaacaacaattggggattccggcccaagagactcaacttcaaactcttcaacatccaagtcaaggaggtcacgacgaatgatggcgtcacaaccatcgctaataaccttaccagcacggttcaagtcttctcggactcggagtaccagcttccgtacgtcctcggctctgcgcaccagggctgcctccctccgttcccggcggacgtgttcatgattccgcaatacggctacctgacgctcaacaatggcagccaagccgtgggacgttcatccttttactgcctggaatatttcccttctcagatgctgagaacgggcaacaactttaccttcagctacacctttgaggaagcgcctttccacagcagctacgcgcacagccagagcctggaccggctgatgaatcctctcatcgaccaatacctgtattacctgaacagaactcaaaatcagtccggaagtgcccaaaacaaggacttgctgtttagccgtgggtctccagctggcatgtctgttcagcccaaaaactggctacctggaccctgttatcggcagcagcgcgtttctaaaacaaaaacagacaacaacaacagcaattttacctggactggtgcttcaaaatataacctcaatgggcgtgaatccatcatcaaccctggcactgctatggcctcacacaaagacgacgaagacaagttctttcccatgagcggtgtcatgatttttggaaaagagagcgccggagcttcaaacactgcattggacaatgtcatgattacagacgaagaggaaattaaagccactaaccctgtggccaccgaaagatttgggaccgtggcagtcaatttccagagcagcagcacagaccctgcgaccggagatgtgcatgctatgggagcattacctggcatggtgtggcaagatagagacgtgtacctgcagggtcccatttgggccaaaattcctcacacagatggacactttcacccgtctcctcttatgggcggctttggactcaagaacccgcctcctcagatcctcatcaaaaacacgcctgttcctgcgaatcctccggcggagttttcagctacaaagtttgcttcattcatcacccaatactccacaggacaagtgagtgtggaaattgaatgggagctgcagaaagaaaacagcaagcgctggaatcccgaagtgcagtacacatccaattatgcgaaatctgccaacgttgattttactgtggacaacaatggactttatactgagcctcgccccgttggcacccgttaccttacccgtcccctg

SEQ ID NO: 1026 - DNA, 2208 bp, synthetic construct
  source 1..2208: mol_type = other DNA; note = Description of Artificial Sequence: Synthetic polynucleotide
atggctgccgatggttatcttccagattggctcgaggacaacctctctgagggcattcgcgagtggtgggacttgaaacctggagccccgaagcccaaagccaaccagcaaaagcaggacgacggccggggtctggtgcttcctggctacaagtacctcggacccttcaacggactcgacaagggggagcccgtcaacgcggcggacgcagcggccctcgagcacgacaaggcctacgaccagcagctcaaagcgggtgacaatccatacctgcggtataaccacgccgacgccgagtttcaggagcgtctgcaagaaaatacgtcttttgggggcaacctcgggcgagcagtcttccaggccaagaagcgggttctcgaacctctcggtctggttgaggaaggcgctaagacggctcctggaaagaaacgtccggtagagcagtcgccacaagagccagactcctcctcgggcatcggcaagacaggccagcagcccgctaaaaagagactcaattttggtcagactggcgactcagagtcagtccccgatccacaacctctcggagaacctccagcaacccccgctgctgtgggacctactacaatggcttcaggcggtggcgcaccaatggcagacaataacgaaggcgccgacggagtgggtaatgcctcaggaaattggcattgcgattccacatggctgggcgacagagtcatcaccaccagcacccgcacctgggccttgcccacctacaataaccacctctacaagcaaatctccagtgcttcaacgggggccagcaacgacaaccactacttcggctacagcaccccctgggggtattttgatttcaacagattccactgccactttccaccacgtgactggcagcgactcatcaacaacaattggggattccggcccaagagactcaacttcaaactcttcaacatccaagtcaaggaggtcacgtcgaatgatggcgtcacaaccatcgctaataaccttaccagcacggttcaagtcttctcggactcggagtaccagcttccgtacgtcctcggctctgcgcaccagggctgcctccctccgttcccggcggacgtgttcatgattccgcaatacggctacctgacgctcaacaatggcagccaagccgtgggacgttcatccttttactgcctggaatatttcccttctcagatgctgagaacgggcaacaactttaccttcagctacacctttgaggaagtgcctttccacagcagctacgcgcacagccagagcctggaccggctgatgaatcctctcatcgaccaatacctgtattacctgaacagaactcaaaatcagtccggaagtgcccaaaacaaggacttgctgtttagccgtgggtctccagctggcatgtctgttcagcccaaaaactggctacctggtccctgttatcggcagcagcgcgtttctaaaacaaaaacagacaacaacaacagcaattttacctggactggtgcttcaaaatataacctcaatgggcgtgaatccatcatcaaccctggcactgctatggcctcacacaaagacgacgaagacaagttctttcccatgagcggtgtcatgatttttggaaaagagagcgccggagcttcaaacactgcattggacaatgtcatgattacagacgaagaggaaattaaagccactaaccctgtggccaccgaaagatttgggaccgtggcagtcaatttccagagcagcagcacagaccctgcgaccggagatgtgcatgctatgggagcattacctggcatggtgtggcaagatagagacgtgtacctgcagggtcccatttgggccaaaattcctcacacagatggacactttcacccgtctcctcttatgggcggctttggactcaagaacccgcctcctcagatcctcatcaaaaacacgcctgttcctgcgaatcctccggcggagttttcagctacaaagtttgcttcattcatcacccaatactccacaggacaagtgagtgtggaaattgaatgggagctgcagaaagaaaacagcaagcgctggaatcccgaagtgcagtacacatccaattatgcaaaatctgccaacgttgattttactgtggacaacaatggactttatactgagcctcgccccattggcacccgttaccttacccgtcccctg

SEQ ID NO: 1027 - DNA, 2208 bp, synthetic construct
  source 1..2208: mol_type = other DNA; note = Description of Artificial Sequence: Synthetic polynucleotide
atggctgccgatggttatcttccagattggctcgaggacaacctctctgagggcattcgcgagtggtgggacttgaaacctggagccccgaagcccaaagccaaccagcaaaagcaggacgacggccggggtctggtgcttcctggctacaagtacctcggacccttcaacggactcgacaagggggagcccgtcaacgcggcggacgcagcggccctcgagcacgacaaggcctacgaccagcagctcaaagcgggtgacaatccgtacctgcggtataaccacgccgacgccgagtttcaggagcgtctgcaagaagatacgtcttttgggggcaacctcgggcgagcagtcttccaggccaagaagcgggttctcgaacctctcggtctggttgaggaaggcgctaagacggctcctggaaagaaacgtccggtagagcagtcgccacaagagccagactcctcctcgggcatcggcaagacaggccagcagcccgctaaaaagagactcaattttggtcagactggcgactcagagtcagtccccgatccacaacctctcggagaacctccagcaacccccgctgctgtgggacctactacaatggcttcaggcggtggcgcaccaatggcagacaataacgaaggcgccgacggagtgggtaatgcctcaggaaattggcattgcgattccacatggctgggcgacagagtcatcaccaccagcacccgcacctgggccttgcccacctacaataaccacctctacaagcaaatctccagtgcttcaacgggggccagcaacgacaaccactacttcggctacagcaccccctgggggtattttgatttcaacagattccactgccacttttcaccacgtgactggcagcgactcatcaacaacaattggggattccggcccaagagactcaacttcaaactcttcaacatccaagtcaaggaggtcacgacgaatgatggcgtcacaaccatcgctaataaccttaccagcacggttcaagtcttctcggactcggagtaccagcttccgtacgtcctcggctctgcgcaccagggctgcctccctccgttcccggcggacgtgttcatgattccgcaatacggctacctgacgctcaacaatggcagccaagccgtgggacgttcatccttttactgcctggaatatttcccttctcagatgctgagaacgggcaacaactttaccttcagctacacctttgaggaagtgcctttccacagcagctacgcgcacagccagagcctggaccggctgatgaatcctctcatcgaccaatacctgtattacctgaacagaactcaaaatcagtccggaagtgcccaaaacaaggacttgctgtttagccgtgggtctccagctggcacgtctgttcagcccaaaaactggctacctggaccctgttatcggcagcagcgcgtttctaaaacaaaaacagacaacaacaacagcaattttacctggactggtgcttcaaaatataacctcaatgggcgtgaatccatcatcaaccctggcactgctatggcctcacacaaagacgacgaagacaagttctttcccatgagcggtgtcatgatttttggaaaagagagcgccggagcttcaaacactgcattggacaatgtcatgattacagacgaagaggaaattaaagccactaaccctgtggccaccgaaagatttgggaccgtggcagtcaatttccagagcagcagcacagaccctgcgaccggagatgtgcatgctatgggagcattacctggcatggtgtggcaagatagagacgtgtacctgcagggtcccatttgggccaaaattcctcacacagatggacactttcacccgtctcctcttatgggcggctttggactcaagaacccgcctcctcagatcctcatcaaaaacacgcctgttcctgcgaatcctccggcggagttttcagctacaaagtttgcttcattcatcacccaatactccacaggacaagtgagtgtggaaattgaatgggagctgcagaaagaaaacagcaagcgctggaatcccgaagtgcagtacacatccaattatgcaaaatctgccaacgttgattttactgtggacaacaatggactttatactgggcctcgccccattggcacccgttaccttacccgtcccctg

SEQ ID NO: 1028 - DNA, 2208 bp, synthetic construct
  source 1..2208: mol_type = other DNA; note = Description of Artificial Sequence: Synthetic polynucleotide
atggctgccgatggttatcttccagattggctcgaggacaacctctctgagggcattcgcgagtggtgggacttgaaacctggagccccgaagcccaaagccaaccagcaaaagcaggacgacggccggggtctggtgcttcctggctacaagtacctcggacccttcaacggactcgacaagggggagcccgtcaacgcggcggacgcagcggccctcgagcacgacaaggcctacgaccagcagctcaaagcgggtgacaatccgtacctgcggtataaccacgccgacgccgagtttcaggagcgtctgcaagaagatacgtcttttgggggcaacctcgggcgagcagtcttccaggccaagaagcgggttctcgaacctctcggtctggttgaggaaggcgctaagacggctcctggaaagaaacgtccggtagagcagtcgccacaagagccagactcctcctcgggcatcggcaagacaggccagcagcccgctaaaaagagactcaattttggtcagactggcgactcagagtcagtccccgatccacaacctctcggagaacctccagcaacccccgctgctgtgggacctactacaatggcttcaggcggtggcgcaccaatggcagacaataacgaaggcgccgacggagtgggtaatgccccaggaaattggcattgcgactccacatggctgggcgacagagtcatcaccaccagcacccgcacctgggccttgcccacctacaataaccacctctacaagcaaatctccagtgcttcaacgggggccagcaacgacaaccactacttcggctacagcaccccctgggggtattttgatttcaacagattccactgccacttttcaccacgtgactggcagcgactcatcaacaacaattggggattccggcccaagagactcaacttcaaactcttcaacatccaagtcaaggaggtcacgacgaatgatggcgtcacaaccatcgctaataaccttaccagcacggttcaagtcttctcggactcggagtaccagcttccgtacgtcctcggctctgcgcaccagggctgcctccctccgttcccggcggacgtgttcatgattccgcaatacggctacctgacgctcaacaatggcagccaagccgtgggacgttcatccttttactgcctggaatatttcccttctcagatgctgagaacgggcaacaactttaccttcagctacacctttgaggaagtgcctttccacagcagctacgcgcacagccagagcctggaccggctgatgaatcctctcatcgaccaatacctgtattacctgaacagaactcaaaatcagtccggaagtgcccaaaacaaggacttgctgtttagccgtgggtctccagctggcatgtctgttcagcccaaaaactggctacctggaccctgttatcggcagcagcgcgtttctaaaacaaaaacagacaacaacaacagcaattttacctggactggtgcttcaaaatataacctcaatgggcgtgaatccatcatcaaccctggcacagctatggcctcacacaaagacgacgaagacaagttctttcccatgagcggtgtcatgatttttggaaaagagagcgccggagcttcaaacactgcattggacaatgtcatgattacaggcgaagaggaaattaaagccactaaccctgtggccaccgaaagatttgggaccgtggcagtcaatttccagagcagcagcacagaccctgcgaccggagatgtgcatgctatgggagcattacctggcatggtgtggcaagatagagacgtgtacctgcagggtcccatttgggccaaaattcctcacacagatggacactttcacccgtctcctcttatgggcggctttggactcaagaacccgcctcctcagatcctcatcaaaaacacgcctgttcctgcgaatcctccggcggagttttcagctacaaagtttgcttcattcatcacccaatactccacaggacaagtgagtgtggaaattgaatgggagctgcagaaagaaaacagcaagcgctggaatcccgaagtgcagtacacatccaattatgcaaaatctgccaacgttgattttactgtggacaacaatggactttatactgagcctcgccccattggcacccgttaccttacccgtcccctg

SEQ ID NO: 1029 - DNA, 2208 bp, synthetic construct
  source 1..2208: mol_type = other DNA; note = Description of Artificial Sequence: Synthetic polynucleotide
atggctgccgatggttatcttccagattggctcgaggacaacctctctgagggcattcgcgagtggtgggacttgaaacctggagccccgaagcccaaagccaaccagcaaaagcaggacgacggccggggtctggtgcttcctggctacaagtacctcggacccttcaacagactcgacaagggggagcccgtcaacgcggcggacgcagcggccctcgagcacgacaaggcctacgaccagcagctcaaagcgggtgacaatccgtacctgcggtataaccacgccgacgccgagtttcaggagcgtctgcaagaagatacgtcttttgggggcaacctcgggcgagcagtcttccaggccaagaagcgggttctcgaacctctcggtctggttgaggaaggcgctaagacggctcctggaaggaaacgtccggtagagcagtcgccacaagagccagactcctcctcgggcatcggcaagacaggccagcagcccgctaaaaagagactcaattttggtcagactggcgactcagagtcagtccccgatccacaacctctcggagaacctccagcaacccccgctgctgtgggacctactacaatggcttcaggcggtggcgcgccaatggcagacaataacgaaggcgccgacggagtgggtaatgcctcaggaaattggcattgcgattccacatggctgggcgacagagtcatcaccaccagcacccgcacctgggccttgcccacctacaataaccacctctacaagcaaatctccagtgcttcaacgggggccagcaacgacaaccactacttcggctacagcaccccctgggggtattttgatttcaacagattccactgccacttttcaccacgtgactggcagcgactcatcaacaacaattggggattccggcccaagagactcaacttcaaactcttcaacatccaagtcaaggaggtcacgacgaatgatggcgtcacaaccatcgctaataaccttaccagcacggttcaagtcttctcggactcggagtaccagcttccgtacgtcctcggctctgcgcaccagggctgcctccctccgttcccggcggacgtgttcatgattccgcaatacggctacctgacgctcaacaatggcggccaagccgtgggacgttcatccttttactgcctggaatatttcccttctcagatgctgagaacgggcaacaactttaccttcagctacacctttgaggaagtgcctttccacagcagctacgcgcacagccagagcctggaccggctgatgaatcctctcatcgaccaatacctgtattacctgaacagaactcaaaatcagtccggaagtgcccaaaacaaggacttgctgtttagccgtgggtctccagctggcatgtctgttcagcccaaaaactggctacctggaccctgttatcggcagcagcgcgtttctaaaacaaaaacagacaacaacaacagcaattttacctggactggtgcttcaaaatatagcctcaatgggcgtgaatccatcatcaaccctggcactgctatggcctcacacaaagacgacgaagacaagttctttcccatgggcggtgtcatgatttttggaaaagagagcgccggagcttcaaacactgcattggacaatgccatgattacagacgaagaggaaattaaagccactaaccctgtggccaccgaaagatttgggaccgtggcagtcaatttccagagcagcagcacagaccctgcgaccggagatgtgcatgctatgggagcattacctggcatggtgtggcaagatagagacgtgtacctgcagggtcccatttgggccaaaattcctcacacagatggacactttcacccgtctcctcttatgggcggctttggactcaagaacccgcctcctcagatcctcatcaaaaacacgcctgttcctgcgaatcctccggcggagttttcagctacaaagtttgcttcattcatcacccaatactccacaggacaagtgagtgtggaaattgaatgggagctgcagaaagaaaacagcaagcgctggaatcccgaagtgcagtacacatccaattatgcaaaatctgccaacgttgattttactgtggacaacaatggactttatactgagcctcgccccattggcacccgttaccttacccgtcccctg

SEQ ID NO: 1030 - DNA, 2208 bp, synthetic construct
  source 1..2208: mol_type = other DNA; note = Description of Artificial Sequence: Synthetic polynucleotide
atggctgccgatggttatcttccagattggctcgaggacaacctctctgagggcattcgcgagtggtgggacttgaaacctggagccccgaagcccaaagccaaccagcaaaagcaggacgacggccggggtctggtgcttcctggctacaagtacctcggacccttcaacggactcgacaagggggagcccgtcaacgcggcggacgcagcggccctcgagcacgacaaggcctacgaccagcagctcaaagcgggtgacaatccgtacctgcggtataaccacgccgacgccgagtttcaggagcgtctgcaagaagatacgtcttttgggggcaacctcgggcgagcagtcttccaggccaagaagcgggttctcgaacctctcggtctggttgaggaaggcgctaagacggctcctggaaagaaacgtccggtagagcagtcgccacaagagccagactcctcctcgggcatcggcaagacaggccagcagcccgctaaaaagagactcaattttggtcagactggcgactcagagtcagtccccgatccacaacctctcggagaacctccagcaacccccgctgctgtgggacctactacaatggcttcaggcggtggcgcaccaatggcagacaataacgaaggcgccgacggagtgggtaatgcctcaggaaattggcattgcgattccacatggctgggcggcagagtcatcaccaccagcacccgcacctgggccttgcccacctacaataaccacctctacaagcaaatctccagtgcttcaacgggggccagcaacgacaaccactacttcggctacagcaccccctgggggtattttgatttcaacagattccactgccacttttcaccacgtgactggcagcgactcatcaacaacaattggggattccggcccaagagactcaacttcaaactcttcaacatccaagtcaaggaggtcacgacgaatgatggcgtcacaaccatcgctaataaccttaccagcacggttcaagtcttctcggactcggagtaccagcttccgtacgtcctcggctctgcgcaccagggctgcctccctccgttcccggcggacgtgttcatgattccgcaatacggctacctgacgctcaacaatggcagccaagccgtgggacgttcatccttttactgcctggaatatttcccttctcagatgctgagaacgggcaacaactctaccttcagctacacctttgaggaagtgcctttccacagcagctacgcgcacagccagagcctggaccggctgatgaatcctctcatcgaccaatacctgtattacctgaacagaactcaaaatcagtccggaagtgcccaaaacaaggacttgctgtttagccgtgggtctccagctggcatgtctgttcagcccaaaaactggctacctggaccctgttatcggcagcagcgcgtttctaaaacaaaaacagacaacaacaacagcaattttacctggactggtgcttcaaaatataacctcaatgggcgtgaatccatcatcaaccctggcactgctatggcctcacacaaagacgacgaagacaagttctttcccatgagcggtgtcatgatttttggaaaagagagcgccggagcttcaaacactgcattggacaatgtcatgattacagacgaagaggaaattaaagccactaaccctgtggccaccgaaagatttgggaccgtggcagtcaatttccagagcagcagcacagaccctgcgaccggagatgtgcatgctatgggaacattacctggcatggtgtggcaagatagagacgtgtacctgcagggtcccatttgggccaaaattcctcacacagatggacactttcacccgtctcctcttatgggcggctttggactcaagaacccgcctcctcagatcctcatcaaaaacacgcctgttcctgcgaatcctccggcggagttttcagctacaaagtttgcttcattcatcacccaatactccacaggacaagtgagtgtggaaattgaatgggagctgcagaaagaaaacagcaagcgctggaatcccgaagtgcagtacacatccaattatgcaaaatctgccaacgttgattttactgtggacaacaatggactttatactgagcctcgccccattggcacccgttaccttacccgtcccctg

SEQ ID NO: 1031 - DNA, 2208 bp, synthetic construct
  source 1..2208: mol_type = other DNA; note = Description of Artificial Sequence: Synthetic polynucleotide
atggctgccgatggttatctcccagattggctcgaggacaacctctctgagggcattcgcgagtggtgggacttgaaacctggagccccgaagcccaaagccaaccagcaaaagcaggacgacggccggggtctggtgcttcctggctacaagtacctcggacccttcaacggactcgacaagggggagcccgtcagcgcggcggacgcagcggccctcgagcacgacaaggcctacgaccagcagctcaaagcgggtgacaatccgtacctgcggtataaccacgccgacgccgagtttcaggagcgtctgcaagaagatacgtcttttgggggcaacctcgggcgagcagtcttccaggccaagaagcgggttctcgaacctctcggtctggttgaggaaggcgctaagacggctcctggaaagaaacgtccggtagagcagtcgccacaagagccagactcctcctcgggcatcggcaagacaggccagcagcccgctaaagagagactcaattttggtcagactggcgactcagagtcagtccccgatccacaacctctcggagaacctccagcaacccccgctgctgtgggacctactacaatggcttcaggcggtggcgcaccaatggcagacaataacgaaggcgccgacggagtgggtaatgcctcaggaaattggcattgcgattccacatggctgggcgacagagtcatcaccaccagcacccgcacctgggccttgcccacctacaataaccacctctacaagcaaatctccagtgcttcaacgggggccagcaacgacaaccactacttcggctacagcaccccctgggggtattttgatttcaacagattccactgccacttttcaccacgtgactggcagcgactcatcaacaacaattggggattccggcccaagagactcaacttcaaactcttcaacatccaagtcaaggaggtcacgacgaatgatggcgtcacaaccatcgccaataaccttaccagcacggttcaagtcttctcggactcggagtaccagcttccgtacgtcctcggctctgcgcaccagggctgcctccctccgttcccggcggacgtgttcatgattccgcaatacggctacctgacgctcaacaatggcagccaagccgtgggacgttcatccttttactgcctggaatatttcccttctcagatgctgagaacgggcaacaactttaccttcagctacacctttgaggaagtgcctttccacagcagctacgcgcacagccagagcctggaccggctgatgaatcctctcatcgaccaatacctgtattacctgaacagaactcaaaatcagtccggaagtgcccaaaacaaggacttgctgtttagccgtgggtctccagctggcatgtctgttcagcccaaaaactggctacctggaccctgttatcggcagcagcgcgtttctaaaacaaaaacagacaacaacaacagcaattttacctggactggtgcttcaaaatataacctcaatgggcgtgaatccatcatcaaccctggcactgctatggcctcacacaaagacgacgaagacaagttctttcccatgagcggtgtcatgatttttggaaaagagagcgccggagcttcaaacactgcattggacaatgtcatgattacagacgaagaggaaattaaagccactaaccctgtggccaccgaaagatttgggaccgtggcagtcaatttccagagcagcagcacagaccctgcgaccggagatgtgcatgctatgggagcattacctggcatggtgtggcaagatagagacgtgtacctgcagggtcccatttgggccaaaattcctcacacagatggacactttcacccgtctcctcttatgggcggctttggactcaagaacccgcctcctcagatcctcatcaaaaacacgcctgttcctgcgaatcctccggcggagttttcagctacaaagtttgcttcattcatcacccaatactccacaggacaagtgagtgtggaaattgaatgggagctgcagaaagaaaacagcaagcgctggaatcccgaagtgcagtacacatccaattatgcaaaatctgccaacgttgattttactgtggacaacaatggactttatactgagcctcgccccattggcacccgttaccttacccgtcccctg

SEQ ID NO: 1032 - DNA, 2208 bp, synthetic construct
  source 1..2208: mol_type = other DNA; note = Description of Artificial Sequence: Synthetic polynucleotide
atggctgccgatggttatcttccagattggctcgaggacaacctctctgagggcattcgcgagtggtgggacttgaaacctggagccccgaagcccaaagccaaccagcaaaagcaggacgacggccggggtctggtgcttcctggctacaagtacctcggacccttcaacggactcgacaagggggagcccgtcaacgcggcggacgcagcggccctcgagcacgacaaggcctacgaccagcagctcaaagcgggtgacaatccgtacctgcggtataaccacgccgacgccgagtttcaggagcgtctgcaagaagatacgtcttttgggggcaacctcgggcgagcagtcttccaggccaagaagcgggttctcgaacctctcggtctggttgaggaaggcgctaagacggctcctggaaagaaacgtccggtagagcagtcgccacaagagccagactcctcctcgggcatcggcaagacaggccagcagcccgctaaaaagagactcaattttggtcagactggcgactcagagtcagtccccgatccacaacctctcggagaacctccagcaacccccgctgctgtgggacctactacaatggcttcaggcggtggcgcaccaatggcagacaataacgaaggcgccgacggagtgggtaatgcctcaggaaattggcattgcgattccacatggctgggcgacagagtcatcaccaccagcacccgcacctgggccttgcccacctacaataaccacctctacaagcaaatctccagtgcttcaacgggggccagcaacgacaaccactacttcggctacagcaccccctgggggtattttgatttcaacagattccactgccacttttcaccacgtgactggcagcgactcatcaacaacaattggggattccggcccaagagactcaacttcaaactcttcaacatccaagtcaaggaggtcacgacgaatgatggcgtcacaaccatcgctaataaccttaccagcacggttcaagtcttctcggactcggagtaccagcttccgtacgtcctcggctctgcgcaccagggctgcctccctccgttcccggcggacgtgttcatgattccgcaatacggctacctgacgctcaacaatggcagccaagccgtgggacgttcatccttttactgcctggaatatttcccttctcagatgctgagaacgggcaacaactttaccttcagctacacctttgaggaagtgcctttccacagcagctacgcgcacagccagagcctggaccggctgatgaatcctctcatcgaccaatacctgtattacctgaacagaactcaaaatcagtccggaagtgcccaaaacaaggacttgctgtttagccgtgggtctccagctggcatgtctgttcagcccaaaaactggctacctggaccctgttatcggcagcagcgcgtttctaaaacaaaaacagacaacaacaacagcaattttacctggactggtgcttcaaaatataacctcaatgggcgtgaatccatcatcaaccctggcactgctatggcctcacacaaagacgacgaagacaagttctttcccatgagcggtgtcatgatttttggaaaagagagcgccggagcttcaaacactgcattggacaatgtcatgattacagacgaaggggaaattaaagccactaaccctgtggccaccgaaagatttgggaccgtggcagtcaatttccagagcagcagcacagaccctgcgaccggagatgtgcatgctatgggagcattacctggcatggtgtggcaagatagagacgtgtacctgcagggtcccatttgggccaaaattcctcacacagatggacactttcacccgtctcctcttatgggcggctttggactcaagaacccgcctcctcagatcctcatcaaaaacacgcctgttcctgcgaatcctccggcggagttttcagctacaaagtttgcttcattcatcacccaatactccacaggacaagtgagtgtggaaattgaatgggagctgcagaaagaaaacagcaagcgctggaatcccgaagtgcagtacacatccaattatgcaaaatctgccaacgttgattttactgtggacaacaatggactttatactgagcctcgccccattggcacccgttaccttacccgtcccctg

SEQ ID NO: 1033 - DNA, 2208 bp, synthetic construct
  source 1..2208: mol_type = other DNA; note = Description of Artificial Sequence: Synthetic polynucleotide
atggctgccgatggttatcttccagattggctcgaggacaacctctctgagggcattcgcgagtggtgggacttgaaacctggagccccgaaacctaaagccaaccagcaaaagcaggacgacggccggggtctggtgcttcctggctacaagtacctcggacccttcaacggactcgacaagggggagcccgtcaacgcggcggacgcagcggccctcgagcacgacaaggcctacgaccagcagctcaaagcgggtgacaatccgtacctgcggtataaccacgccgacgccgagtttcaggagcgtctgcaagaagatacgtcttttgggggcaacctcgggcgagcagtcttccaggccaagaagcgggttctcgaaccttttggtctggttgaggaaggcgctaagacggctcctggaaagaaacgtccggtagagcagtcgccacaagagccagactcctcctcgggcatcggcaagacaggccagcagcccgctaaaaagagactcaattttggtcagactggcgactcagagtcagtccccgacccacaacctctcggagaacctccagcaacccccgctgctgtgggacctactacaatggcttcaggcggtggcgcaccaatggcagacaataacgaaggcgccgacggagtgggtaatgcctcaggaaattggcattgcgattccacatggctgggcgacagagtcatcaccaccagcacccgcacctgggccttgcccacctacaataaccacctctacaagcaaatctccagtgcttcaacgggggccagcaacgacaaccactacttcggctacagcaccccctgggggtattttgatttcaacagattccactgccacttttcaccacgtgactggcagcgactcatcaacaacaattggggattccggcccaagagactcaacttcaagctcttcaacatccaagtcaaggaggtcacgacgaacgatggcgtcacgaccatcgctaataaccttaccagcacggttcaagtcttctcggattcagagtaccaactgccgtacgtcctcggctctgcgcaccagggctgcctccctccgttcccggcggacgtgtttatgattccgcagtacggctacctaacgctcaacaatggcagccaggccgtgggacgttcatccttttactgcccggaatatttcccttctcagatgctgagaacgggcaacaactttaccttcagctacacctttgaggaagtgcctttccacagcagctacgcgcacagccagagcctggaccggctgatgaatcctctcatcgaccaatacctgtattacctgaacagaactcaaaatcagtccggaagtgcccaaaacaaggacttgctgtttagccgtgggtctccagctggcatgtctgttcagcccaaaaactggctacctggaccctgttatcggcagcagcgcgtttctaaaacaaaaacagacaacaacaacagcaattttacctggactggtgcttcaaaatataacctcaatgggcgtgaatccatcatcaaccctggcactgctatggcctcacacaaagacgacaaagacaagttctttcccatgagcggtgtcatgatttttggaaaagagagcgccggagcttcaaatactgcattggacaatgtcatgatcacagatgaagaggaaattaaagccactaaccctgtggccaccgaaagatttgggaccgtggcagtcaatttccagagcagcaacacagaccccgcgaccggagatgtgcatgttatgggagccttacctggcatggtgtggcaagacagagacgtatacctgcagggtcccatttgggccaaaattcctcacacggatggacactttcacccgtctcctctcatgggcggctttggacttaagcacccgcctcctcaaatcctcatcaaaaacacgcctgttcctgcgaatcctccggcagagttttcggctacaaagtttgcttcattcatcacccagtactccacaggacaagtgagtgtggaaattgaatgggagctgcagaaagaaaacagcaagcgctggaatcccgaagtgcagtacacatccaattatgcaaaatctgccaacgttgatttcactgtggacaacaatggactttatactgagcctcgccccattggcacccgttaccttacccgtcccttg

SEQ ID NO: 1034 - DNA, 2208 bp, synthetic construct
  source 1..2208: mol_type = other DNA; note = Description of Artificial Sequence: Synthetic polynucleotide
atggctgccgatggttatcttccagattggctcgaggacaacctctctgagggcattcgcgagtggtgggacttgaaacctggagccccgaaacctaaagccaaccagcaaaagcaggacgacggccggggtctggtgcttcctggctacaagtacctcggacccttcaacggactcgacaagggggagcccgtcaacgcggcggacgcagcggccctcgagcacgacaaggcctacgaccagcagctcaaagcgggtgacaatccgtacctgcggtataaccacgccgacgccgagtttcaggagcgtctacaagaagatacgtcttttgggggcaacctcgggcgagcagtcttccaggccaagaagcgggttctcgaaccttttggtctggttgaggaaggcgctaagacggctcctggaaagaaacgtccggtagagcagtcgccacaagagccagactcctcctcgggcatcggcaagacaggccagcagcccgctaaaaagagactcaattttggtcagactggcgactcagagtcagtccccgacccacaacctctcggagaacctccagcaacccccgctgctgtgggacctactacaatggcttcaggcggtggcgcaccaatggcagacaataacgaaggcgccgacggagtgggtaatgcctcaggaaattggcattgcgattccacatggctgggcgacagagtcatcaccaccagcacccgcacctgggccttgcccacctacaataaccacctctacaagcaaatctccagtgcttcaacgggggccagcaacgacaaccactacttcggctacagcaccccctgggggtattttgatttcaacagattccactgccacttttcaccacgtgactggcagcgactcatcaacaacaattggggattccggcccaagagactcaacttcaagctcttcaacatccaagtcaaggaggtcacgacgaacgatggcgtcacgaccatcgctaataaccttaccagcacggttcaagtcttctcggattcagagtaccaactgccgtacgtcctcggctctgcgcaccagggctgcctccctccgttcccggcggacgtgttcatgattccgcagtacggctacctaacgctcaacaatggcagccaggccgtgggacgttcatccttttactgcctggaatatttcccttctcagatgctgagaacgggcaacaactttaccttcagctacacctttgaggaagtgcctttccacagcagctacgcgcacagccagagcctggaccggctgatgaatcctctcatcgaccaatacctgtattacctgaacagaactcaaaatcagtccggaagtgcccaaaacaaggacttgctgtttagccgtgggtctccagctggcatgtctgttcagcccaaaaactggctacctggaccctgttatcggcagcagcgcgtttctaaaacaaaaacagacaacaacaacagcaattttacctggactggtgcttcaaaatataacctcaatgggcgtgaatccatcatcaaccctggcactgctatggcctcacacaaagacgacaaagacaagttctttcccatgagcggtgtcatgatttttggaaaagagagcgccggagcttcaaatactgcattggacaatgtcatgatcacagatgaagaggaaattaaagccactaaccctgtggccaccgaaagatttgggaccgtggcagtcaatttccagagcagcgacacagaccccgcgaccggagatgtgcatgttatgggagccttacctggcatggtgtggcaagacagagacgtatacctgcagggtcccatttgggccaaaattcctcacacggatggacactttcacccgtctcctctcatgggcggctttggacttaagcacccgcctcctcaaatcctcatcaaaaacacgcctgttcctgcgaatcctccggcagagttttcggctacaaagtttgcttcattcatcacccagtactccacaggacaagtgagtgtggaaattgaatgggagctgcagaaagaaaacagcaagcgctggaatcccgaagtgcagtacacatccaattatgcaaaatctgccaacgttgatttcactgtggacaacaatggactttatactgagcctcgccccattggcacccgttaccttacccgtcccttg

SEQ ID NO: 1035 - DNA, 2208 bp, synthetic construct
  source 1..2208: mol_type = other DNA; note = Description of Artificial Sequence: Synthetic polynucleotide
atggctgccgatggttatcttccagattggctcgaggacaacctctctgagggcattcgcgagtggtgggacttgaaacctggagccccgaaacctaaagccaaccagcaaaagcagggcgacggccggggtctggtgcttcctggctacaagtacctcggacccttcaacggactcgacaagggggagcccgtcaacgcggcggacgcagcggccctcgagcacgacaaggcctacgaccagcagctcaaagcgggtgacaatccgtacctgcggtataaccacgccgacgccgagtttcaggagcgtctgcaagaagatacgtcttttgggggcaacctcgggcgagcagtcttccaggccaagaagcgggttctcgaaccttttggtctggttgaggaaggcgctaagacggctcctggaaagaaacgtccggtagagcagtcgccacaagagccagactcctcctcgggcatcggcaagacaggccagcagcccgctaaaaagagactcaattttggtcagactggcgactcagagtcagtccccgacccacaacctctcggagaacctccagcaacccccgctgctgtgggacctactacaatggcttcaggcggtggcgcaccaatggcagacaataacgaaggcgccgacggagtgggtaatgcctcaggaaattggcattgcgattccacatggctgggcgacagagtcatcaccaccaacactcgcacctgggccttgcccacctacaataaccacctctacaagcaaatctccagtgcttcaacgggggccagcaacgacaaccactacttcggctacagcaccccctgggggtattttgatttcaacagattccactgccacttttcaccacgtgactggcagcgactcatcaacaacaattggggattccggcccaagagactcaacttcaagctcttcaacatccaagtcaaggaggtcacgacgaacgatggcgtcacgaccatcgctaataaccttaccagcacggttcaagtcttctcggattcagagtaccaactgccgtacgtcctcggctctgcgcaccagggctgcctccctccgttcccggcggacgtgttcatgattccgcagtacggctacctaacgctcaacaatggcagccaggccgtgggacgttcatccttttactgcctggaatatttcccttctcagatgctgagaacgggcaacaactttaccttcagctacacctttgaggaagtgcctttccacagcagttacgggcacagccagagcctggaccggctgatgaatcttctcatcgaccaatacctgtattacctgaacagaactcaaaatcagtccggaagtgcccaaaacaaggacttgctgtttagccgtgggtctccagctggcatgtttgttcagcccaaaaactggctacctggaccctgttatcggcagcagcgcgtttctaaaacaaaaacagacaacaacaacagcaattttacctggactggtgcttcaaaatataacctcaatgggcgtgaatccatcatcaaccctggcactgctatggcctcacacaaagacgacgaagacaagttctttcccatgagcggtgtcatgatttttggaaaagagagcgccggagcttcaaatactgcattggacaatgtcatgatcacagatgaagaggaaattaaagccactaaccctgtggccaccgaaagatttgggaccgtggcagtcaatttccagagcagcagcacagaccccgcgaccggagatgtgcatgttatgggagccttacctggcatggtgtggcaagacagagacgtatacctgcagggtcccatttgggccaaaattcctcacacggatggacactttcacccgtctcctctcatgggcggctttggacttaagcacccgcctcctcaaatcctcatcaaaaacacgcctgttcctgcgaatcctccggcagagttttcggctacaaagtttgcttcattcatcacccagtactccacaggacaagtgagtgtggaaattgaatgggagctgcagaaagaaaacagcaagcgctggaatcccgaagtgcagtacacatccaattatgcaaaatctgccaacgttgatttcactgtggacaacaatggactttatactgagcctcgccccattggcacccgttaccttacccgtcccttg

SEQ ID NO: 1036 - DNA, 2208 bp, synthetic construct
  source 1..2208: mol_type = other DNA; note = Description of Artificial Sequence: Synthetic polynucleotide
atggctgccgatggttatcttccagattggctcgaggacaacctctctgagggcattcgcgagtggtgggacttgaaacctggagccccgaaacctaaagccaaccagcaaaagcaggacgacggccggggtctggtgcttcctggctacaagtacctcggacccttcaacggactcgacaagggggagcccgtcaacgcggcggacgcagcggccctcgagcacgacaaggcctacgaccagcagctcaaagcgggtgacaatccgtacctgcggtataaccacgccgacgccgagtttcaggagcgtctgcaagaagatacgtcttttgggggcaacctcgggcgagcagtcttccaggccaagaagcgggttctcgaaccttttggtctggttgaggaaggcgctaagacggctcctggaaagaaacgtccggtagagcagtcgccacaagagccagactcctcctcgggcatcggcaagacaggccagcagcccgctaaaaagagactcaattttggtcagactggcgactcagagtcagtccccgacccacaacctctcggagaacctccagcaacccccgctgctgtgggacctactacaatggcttcaggcggtggcgcaccaatggcagacaataacgaaggcgccgacggagtgggtaatgcctcaggaaattggcattgcgattccacatggctgggcgacagagtcatcaccaccaacacccgcacctgggccttgcccacctacaataaccacctctacaagcaaatctccagtgcttcaacgggggccagcaacgacaaccactacttcggctacagcaccccctgggggtattttgatttcaacagattccactgccacttttcaccacgtgactggcagcgactcatcaacaacaattggggattccggcccaagagactcaacttcaagctcttcaacatccaagtcaaggaggtcacgacgaacgatggcgtcacgaccatcgctaataaccttaccagcacggttcaagtcttctcggattcagagtaccaactgccgtacgtcctcggctctgcgcaccagggctgcctccctccgttcccggcggacgtgttcatgattccgcagtacggctacctaatgctcaacaatggcagccaggccgtgggacgttcatccttttactgcctggaatatttcccttctcagatgctgagaacgggcaacaactttaccttcagctacacctttgaggaagtgcctttccacagcagctacgcgcacagccagagcctggaccggctgatgaatcctctcatcgaccaatacctgtattacctgaacagaactcaaaatcagtccggaagtgcccaaaacaaggacttgctgtttagccgtgggtctccagctggcatgtctgttcagcccaaaaactggctacctggaccctgttatcggcagcagcgcgtttctaaaacaaaaacagacaacaacaacagcaattttacctggactggtgcttcaaaatataacctcaatgggcgtgaatccatcatcaaccctggcactgctatggcctcacacaaagacgacgaagacaagttctttcccatgagcggtgtcatgatttttggaaaagagagcgccggagcttcaaatactgcattggacaatgtcatgatcacagatgaagaggaaattaaagccactaaccctgcggccaccgaaagatttgggaccgtggcagtcaatttccagagcagcagcacagaccccgcgaccggagatgtgcatgttatgggagccttacctggcatggtgtggcaagacagagacgtatacctgcagggtcccatttgggccaaaattcctcacacggatggacactttcacccgtctcctctcatgggcggctttggacttaagcacccgcctcctcaaatcctcatcaaaaacacgcctgttcctgcgaatcctccggcagagttttcggctacaaagtttgcttcattcatcacccagtactccacaggacaagtgagtgtggaaattgaatgggagctgcagaaagaaaacagcaagcgctggaatcccgaagtgcagtacacatccaattatgcaaaatctgccaacgttgatttcactgtggacaacaatggactttatactgagcctcgccccattggcacccgttaccttacccgtcccttg

SEQ ID NO: 1037 - DNA, 2208 bp, synthetic construct
  source 1..2208: mol_type = other DNA; note = Description of Artificial Sequence: Synthetic polynucleotide
atggctgccgatggttatcttccagattggctcgaggacaacctctctgagggcattcgcgagtggtgggacttgaaacctggagccccgaaacctaaagccaaccagcaaaagcaggacgacggccggggtctggtgcttcctggctacaagtacctcggacccttcaacggactcgacaagggggagcccgtcaacgcggcggacgcagcggccctcgagcacgacaaggcctacgaccagcagctcaaagcgggtgacaatccgtacctgcggtataaccacgccgacgccgagtttcaggagcgtctgcaagaagatacgtcttttgggggcaacctcgggcgagcagtcttccaggccaagaagcgggttctcgaaccttttggtctggttgaggaaggcgctaagacggctcctggaaagaaacgtccggtagagcagtcgccacaagagccagactcctcctcgggcatcggcaagacgggccagcagcccgctaaaaagagactcaattttggtcagactggcgactcagagtcagtccccgacccacaacctctcggagaacctccagcaacccccgctgctgtgggacctactacaatggcttcaggcggtggcgcaccaatggcagacaataacgaaggcgccgacggagtgggtaatgcctcaggaaattggcattgcgattccacatggctgggcgacagagtcatcaccaccagcacccgcacctgggccttgcccacctacaataaccacctctacaagcaaatctccagtgcttcaacgggggccagcaacgacaaccactacttcggctacagcaccccctgggggtattttgatttcaacagattccactgccacttttcaccacgtgactggcagcgactcatcaacaacaattggggattccggcccaagagactcaacttcaagctcttcaacatccaagtcaaggaggtcacgacgaacgatggcgtcacgaccatcgctaataaccttaccagcacggttcaagtcttctcggattcagagtaccaactgccgtacgtcctcggctctgcgcaccagggctgcctccctccgttcccggcggacgtgttcatgattccgcagtacggctacctaacgctcaacaatggcagccaggccgtgggacgttcatccttttactgcctggaatatttcccttctcagatgctgagaacgggcaacaactttaccttcagctacacctttgaggaagtgcctttccacagcagctacgcgcacagccagagcctggaccggctgatgaatcctctcatcgaccaatacctgtattacctgaacagaactcaaaatcagtccggaagtgcccaaaacaaggacttgctgtttagccgtgggtctccagctggcatgtccgttcagcccaaaaactggctacctggaccctgttatcggcagcagcgcgtttctaaaacaaaaacagacaacaacaacagcaattttacctggactggtgcttcaaaatataacctcaatgggcgtgaatccatcatcaaccctggcactgctatggcctcacacaaagacgacgaagacaagttctttcccatgagcggtgtcatgatttttggaaaagagagcgccggagcttcaaatactgcattggacaatgtcatgatcacagatgaagaggaaattaaagccactaaccctgtggccaccgaaagatttgggaccgtggcagtcaatttccagagcagcagcacagaccccgcgaccggagatgtgcatgttatgggagccttacctggcatggtgtggcaagacagagacgtatacctgcagggtcccatttgggccaaaattcctcacacggatggacactttcacccgtctcctctcatgggcggctttggacttaagcacccgcctcctcaaatcctcatcaaaaacacgcctgttcctgcgaatcctccggcagagttttcggctacaaagtttgcttcattcatcacccagtactccacaggacaagtgagtgtggaaattgaatgggagctgcagaaagaaaacagcaagcgctggaatcccgaagtgcagtacacatccaattatgcaaaatctgccaacgttgatttcactgtggacaacaatggactttatactgagcctcgccccattggcacccgttaccttacccgtcccttg

SEQ ID NO: 1038 - DNA, 2208 bp, synthetic construct
  source 1..2208: mol_type = other DNA; note = Description of Artificial Sequence: Synthetic polynucleotide
  misc_difference 305: note = modified_base - a, c, t, g, unknown or other
atggctgccgatggttatcttccagattggctcgaggacaacctctctgagggcattcgcgagtggtgggacttgaaacctggagccccgaaacctaaagccaaccagcaaaagcaggacgacggccggggtctggtgcttcctggctacaagtacctcggacccttcaacggactcgacaagggggagcccgtcaacgcggcggacgcagcggccctcgagcacgacaaggcctacgaccagcagctcaaagcgggtgacaatccgtacctgcggtataaccacgccgacgccgagtttcaggngcgtctgcaagaagatacgtcttttgggggcaacctcgggcgagcagtcttccaggccaagaagcgggttctcgaaccttttggtctggttgaggaaggcgctaagacggctcctggaaagaaacgtccggtagagcagtcgccacaagagccagactcctcctcgggcatcggcaagacaggccagcagcccgctaaaaagagactcaattttggtcagactggcgactcagagtcagtccccgacccacaacctctcggagaacctccagcaacccccgctgctgtgggacctactacaatggcttcaggcggtggcgcaccaatggcagacaataacgaaggcgccgacggagtgggtaatgcctcaggaaattggcattgcgattccacatggctgggcggcagagtcatcaccaccagcacccgcacctgggccttgcccacctacaataaccacctctacaagcaaatctccagtgcttcaacgggggccagcaacgacaaccactacttcggccacagcaccccctgggggtattttgatttcaacagattccactgccacttttcaccacgtgactggcagcgactcatcaacaacaattggggattccggcccaagagactcaacttcaagctcttcaacatccaagtcaaggaggtcacgacgaacgatggcgtcacgaccatcgctaataaccttaccagcacggttcaagtcttctcggattcagagtaccaactgccgtacgtcctcggctctgcgcaccagggctgcctccctccgtccccggcggacgtgttcatgattccgcagtacggctacctaacactcaacaatggcagccaggccgtgggacgttcatccttttactgcctggaatatttcccttctcagatgctgagaacgggcaacaactttaccttcagctacacctttgaggaagtgcctttccacagcagctacgcgcacagccagagcctggaccggctgatgaatcctctcatcgaccaatacctgtattacctgaacagaactcaaaatcagtccggaagtgcccaaaacaaggacttgctgtttagccgtgggtctccagctggcatgtctgttcagcccaaaaactggctacctggaccctgttatcggcagcagcgcgtttctaaaacaaaaacagacaacaacaacagcaattttacctggactggtgcttcaaaatataacctcaatgggcgtgaatccatcatcaaccctggcactgctatggcctcacacaaagacgacaaagacaagttctttcccatgagcggtgtcatgatttttggaaaagagagcgccggagcttcaaatactgcattggacaatgtcatgatcacagatgaagaggaaattaaagccactaaccctgtggccaccgaaagatttgggaccgtggcagtcaatttccagagcagcaacacagaccccgcgaccggagatgtgcatgttatgggagccttacctggcatggtgtggcaagacagagacgtatacctgcagggtcccatttgggccaaaattcctcacacggatggacactttcacccgtctcctctcatgggcggctttggacttaagcacccgcctcctcaaatcctcatcaaaaacacgcctgttcctgcgaatcctccggcagagttttcggctacaaagtttgcttcattcatcacccagtactccacaggacaagtgagtgtggaaattgaatgggagctgcagaaagaaaacagcaagcgctggaatcccgaagtgcagtacacatccaattatgcaaaatctgccaacgttgatttcactgtggacaacaatggactttatactgagcctcgccccattggcacccgttaccttacccgtcccttg

SEQ ID NO: 1039 - DNA, 2208 bp, synthetic construct
  source 1..2208: mol_type = other DNA; note = Description of Artificial Sequence: Synthetic polynucleotide
atggctgccgatggttattttccagattggctcgaggacaacctttctgagggcattcgcgagtggtgggacttgaaacctggagccccgaaacctaaagccaaccagcaaaagcaggacgacggccggggtctggtgcttcctggctacaagtacctcggacccttcaacggactcgacaagggggagcccgtcaacgcggcggacgcagcggccctcgagcacgacaaggcctacgaccagcagctcaaagcgggtgacaatccgtacctgcggtataaccacgccgacgccgagtttcaggagcgtctgcaagaagatacgtcttttgggggcaacctcgggcgagcagtcttccaggccaagaagcgggttctcgaaccttttggtctggttgaggaaggcgctaagacggctcctggaaagaaacgtccggtagagcagtcgccacaagagccagactcctcctcgggcatcggcaggacaggccagcagcccgctaaaaagagactcaattttggtcagactggcgactcagagtcagtccccgacccacaacctctcggagaacctccagcgacccccgctgctgtgggacctactacaatggcttcaggcggtggcgcaccaatggcagacaataacgaaggtgccgacggagtgggtaatgcctcaggaaattggcattgcgattccacatggctgggcgacagagtcatcaccaccagcacccgcacctgggccttgcccacctacaataaccacctctacaagcaaatctccagtgcttcaacgggggccagcaacgacaaccactacttcggctacagcaccccctgggggtattttgatttcaacagattccactgccacttttcaccacgtgactggcagcgactcatcaacaacaattggggattccggcccaagagactcaacttcaagctcttcaacatccaagtcaaggaggtcacgacgaacgatggcgtcacgaccatcgctaataaccttaccagcacggttcaagtcttctcggattcagagtaccaactgccgtacgtcctcggctctgcgcaccagggctgcctccctccgttcccggcggacgtgttcatgattccgcagtacggctacctaacgctcaacaatggcagccaggccgtgggacgttcatccttttactgcctggaatatttcccttctcagatgctgagaacgggcaacaactttaccttcagctacacctttgaggaagtgcctttccacagcagctacgcgcacagccagagcctggaccggctgatgaatcctctcatcgaccaatacctgtattacctgaacagaactcaaaatcagtccggaagtgcccaaaacaaggacttgctgtttagccgtgggtctccagctggcatgtctgttcagcccaaaaactggctacctggaccctgttatcggcagcagcgcgtttctaaaacaaaaacagacaacaacaacagcaattttacctggactggtgcttcaaaatataacctcaatgggcgtgaatccatcatcaaccctggcactgctatggcctcacacaaagacgacgaagacaagttctttcccatgagcggtgtcatgatttttggaaaagagagcgccggagcttcaaatactgcattggacaatgtcatgatcacagatgaagaggaaattaaagccactaaccctgtggccaccgaaagatttgggaccgtggcagtcaatttccagagcagcagcccagaccccgcgaccggagatgtgcatgttatgggagccttacctggcatggtgtggcaagacagagacgtatacctgcagggtcccatttgggccaaaattcctcacacggatggacactttcacccgtctcctctcatgggcggctttggacttaagcacccgcctcctcaaatcctcatcaaaaacacgcctgttcctgcgaatcctccggcagagttttcggctacaaagtttgcttcattcatcacccagtactccacaggacaagtgagtgtggaaattgaatgggagctgcagaaagaaaacagcaagcgctggaatcccgaagtgcagtacacatccaattatgcaaaatctgccaacgttgatttcactgtggacaacaatggactttatagtgagcctcgccccattggcacccgttaccttacccgtcccttg

SEQ ID NO: 1040 - DNA, 2208 bp, synthetic construct
  source 1..2208: mol_type = other DNA; note = Description of Artificial Sequence: Synthetic polynucleotide
atggctgccgatggttatcttccagattggctcgaggacaacctctctgagggcattcgcgagtggtgggacttgaaacctggagccccgaaacctaaagccaaccagcaaaagcaggacgacggccggggtctggtgcttcctggctacaagtacctcggacccttcaacggactcgacaagggggagcccgtcaacgcggcggacgcagcggccctcgagcacgacaaggcctacgaccagcagctcaaagcgggtgacaatccgtacctgcggtataaccacgccgacgccgagtttcaggagcgtctgcaagaagatacgtcttttgggggcaacctcgggcgagcagtcttccaggccaagaagcgggttctcgaaccttttggtctggttgaggaaggcgctaagacggctcctggaaagaaacgtccggtagagcagtcgccacaagagccagactcctcctcgggcatcggcaagacaggccagcagcccgctaaaaagagactcaattttggtcagactggcgactcagagtcagtccccgacccacaacctctcggagaacctccagcaacccccgctgctgtgggacctactacaatggcttcaggcggtggcgcaccaatggcagacaataacgaaggcgccgacggagtgggtaatgcctcaggaaattggcattgcgattccacatggctgggcgacagagtcatcaccaccagcacccgcacctgggccttgcccacctacaataaccacctctacaagcaaacctccagtgcttcaacgggggccagcaacgacaaccactacttcggctacagcaccccctgggggtattttgatttcaacagattccactgccacttttcaccacgtgactggcagcgactcatcaacaacaattggggattccggcccaagagactcaacttcaagctcttcaacatccaagtcaaggaggtcacgacgaacgatggcgtcacgaccatcgctaataaccttaccagcacggttcaagtcttctcggattcagagtaccaactgccgtacgtcctcggctctgcgcaccagggctgcctccctccgttcccggcggacgtgttcatgattccgcagtacggctacctaacgctcaacaatggcagccaggccgtgggacgttcatccttttactgcctggaatatttcccttctcagatgctgagaacgggcaacaactttaccttcagctacacctttgaggaagtgcctttccacagcagctacgcgcacagccagagcctggaccggctgatgaatcctctcatcgaccaatacctgtattacctgaacagaactcaaaatcagtccggaagtgcccaaaacaaggacttgctgtttagccgtgggtctccagctggcatgtctgttcagcccaaaaactggctacctggaccctgttatcggcagcagcgcgtttctaaaacaaaaacagactacaacaacagcaattttacctggactggtgcttcaaaatataacctcaatgggcgtgaatccatcatcaaccctggcactgctatggcctcacacaaagacgacgaagacaagttctttcccatgagcggtgtcatgatttttggaaaagagagcgccggagcttcaaatactgcattggacaatgtcatgatcacagatgaagaggaaattaaagccactaaccctgtggccaccgaaagatttgggaccgtggcagtcaatttccagagcagcagcacagaccccgcgaccggagatgtgcatgttatgggagccttacctggcatggtgtggcaagacagagacgtatacctgcagggtcccatttgggccaaaattcctcacacggatggacactttcacccgtctcctctcatgggcggctttggacttaagcacccgcctcctcaaatcctcatcaaaaacacgcctgttcctgcgaatcctccggcagagttttcggctacaaagtttgcttcattcatcacccagtactccacaggacaagtgagtgtggaaattgaatgggagctgcagaaagaaaacagcaagcgctggaatcccgaagtgcagtacacatccaattatgcaaaatctgccaacgttgatttcactgtggacaacaatggactttatactgagcctcgccccattggcacccgttaccttacccgtcccttg

SEQ ID NO: 1041 - DNA, 2208 bp, synthetic construct
  source 1..2208: mol_type = other DNA; note = Description of Artificial Sequence: Synthetic polynucleotide
atggctgccgatggttatcctccagattggctcgaggacaacctctctgagggcattcgcgagtggtgggacttgaaacctggagtcccgaaacctaaagccaaccagcaaaagcaggacgacggccggggtctggtgcttcctggctacaagtacctcggacccttcaacggactcgacaagggggagcccgtcaacgcggcggacgcagcggccctcgagcacgacaaggcctacgaccagcagctcaaagcgggtgacaatccgtacctgcggtataaccacgccgacgccgagtttcaggagcgtctgcaagaagatacgtcttttgggggcaacctcgggcgagcagtcttccaggccaagaagcgggttctcgaaccttttggtctggttgaggaaggcgctaagacggctcctggaaagaaacgtccggtagagcagtcgccacaagagccagactcctcctcgggcatcggcaagacaggccagcagcccgctaaaaagagactcaattttggtcagactggcgactcagagtcagtccccgacccacaacctctcggagaacctccagcaacccccgctgctgtgggacctactacaatggcttcaggcggtggcgcaccaatggcagacaataacgaaggcgccgacggagtgggtaatgcctcaggaaattggcattgcgattccacatggctgggcgacagagtcatcaccaccagcacccgcacctgggccttgcccacctacaataaccacctctacaagcaaatctccagtgcttcaacgggggccagcaacgacaaccactacttcggctacagcaccccctgggggtattttgatttcaacagattccactgccacttttcaccacgtgactggcagcgactcatcaacaacaattggggattccggcccaagagactcaacttcaagctcttcaacatccaagtcaaggaggtcacgacgaacgatggcgtcacgaccatcgctaataaccttaccagcacggttcaagtcttctcggattcagagtaccaactgccgtacgtcctcggctctgcgcaccagggctgcctccctccgttcccggcggacgtgttcatgattccgcagtacggctacctaacgctcaacaatggcagccaggccgtgggacgttcatccttttactgcctggaatatttcccttctcagatgctgagaacgggcaacaactttaccttcagctacacctttgaggaagtgcctttccacagcagctacgcgcacagccagagcctggaccggctgatgaatcctctcatcgaccaatacctgtattacctgaacagaactcaaaatcagtccggaagtgcccaaaacaaggacttgctgtttagccgtgggtctccagctggcatgtctgttcagcccaaaaactggctacctggaccctgttatcggcagcagcgcgtttctaaaacaaaaacagacaacaacaacagcaattttacctggactggtgcttcaaaatataacctcaatgggcgtgaatccatcatcaaccctggcactgctatggcctcacacaaagacgacgaagacaagttctttcccatgagcggtgtcatgatttttggaaaagagagcgccggagcttcaaatactgcattggacaatgtcatgatcacagatgaagaggaaattaaagccactaaccctgtggccaccgaaagatttgggaccgtggcagtcaatttccagagcagcagcacagaccccgcgaccggagatgtgcatgttatgggagccttacctggcatggtgtggcaagacagagacgtatacctgcagggtcccatttgggccaaaattcctcacacggatggacactttcacccgtctcctctcatgggcggctttggacttaagcacccgcctcctcaaatcctcatcaaaaacacgcctgttcctgcgaatcctccggcagagttttcggctacaaagtttgcttcattcatcacccagtactccacaggacaagtgagtgtggaaattgaatgggagctgcagaaagaaaacagcaagcgctggaatcccgaagtgcagtacacatccaattatgcaaaatctgccaacgttgatttcactgtggacaacaatggactttatactgagcctcgccccattggcacccgttaccttacccgtcccttg

SEQ ID NO: 1042 - DNA, 2196 bp, synthetic construct
  source 1..2196: mol_type = other DNA; note = Description of Artificial Sequence: Synthetic polynucleotide
atggctgccgatggttatcttccagattggctcgaggacaacctctctgagggcattcgcgagtggtgggacttgaaacctggagccccgaaacctaaagccaaccagcaaaagcaggacgacggccggggtctggtgcttcctggctacaagtacctcggacccttcaacggactcgacaagggggagcccgtcaacgcggcggacgcagcggccctcgagcacgacaaggcctacgaccagcagctcaaagcgggtgacaatccgtacctgcggtataaccacgccgacgccgagtttcaggagcgtctgcaagaagatacgtcttttgggggcaacctcgggcgagcagtcttccaggccaagaagcgggttctcgaaccttttggtctggttgaggaaggcgctaagacggctcctggaaagaaacgtccggtagagcagtcgccacaagagccagactcctcctcgggcatcggcaagacaggccagcagcccgctaaaaagagactcaattttggtcagactggcgactcagagtcagtccccgacccacaacctctcggagaacctccagcaacccccgctgctgtgggacctactacaatggcttcaggcggtggcgcaccaatggcagacaataacgaaggcgccgacggagtgggtaatgcctcaggaaattggcattgcgattccacatggctgggcgacagagtcatcaccaccagcacccgcacctgggccttgcccacctacaataaccacctctacaagcaaatctccagtgcttcaacgggggccagcaacgacaaccactacttcggctacagcaccccctgggggtattttgatttcaacagattccactgccacttttcaccacgtgactggcagcgactcatcaacaacaattggggattccggcccaagagactcaacttcaagctcttcaacatccaagtcaaggaggtcacgacgaacgatggcgtcacgaccatcgctaataaccttaccagcacggttcaagccttctcggattcagagtaccaactgccgtacgtcctcggctctgcgcaccagggctgcctccctccgttcccggcggacgtgttcatgattccgcagtacggctacctaacgctcaacaatggcagccaggccgtgggacgttcatccttttactgcctggaatatttcccttctcagatgctgagaacgggcaacaactttaccttcagctacacctttgaggaagtgcctttccacagcagctacgcgcacagccagagcctggaccggctgatgaatcctctcatcgacccatacctgtattacctgaacagaactcaaaatcagtccggaagtgcccaaaacaaggacttgctgtttagccgtgggtctccagctggcatgtctgttcagcccaaaaactggctacctggaccctgttatcggcagcagcgcgtttctaaaacaaaaacagacaacaacaacagcaattttacctggactggtgcttcaaaatataacctcaatgggcgtgaatccatcatcaaccctggcactgctatggcctcacacaaagacgacgaagacaagttctttcccatgagcggtgtcatgatttttggaaaagagagcgccggagcttcaaatactgcattggacaatgtcatgatcacagatgaagaggaaattaaagccactaaccctgtggccaccgaaagatttgggaccgtggcagtcaatttccagagcagcagcacagaccccgcgaccggagatgtgcatgttatgggagccttacctggcatggtgtggcaagacagagacgtatacctgcagggtcccatttgggccaaaattcctcacacggatggacactttcacccgtctcctctcatgggcggctttggacttaagcacccgcctcctcaaatcctcatcaaaaacacgcctgttcctgcgaatcctccggcagagttttcggctacaaagtttgcttcattcatcacccagtactccacaggacaagtgagtgtggaaattgaatgggagctgcagaaagaaaacagcaagcgctggaatcccgaagtgcagtacacatccaattatgcaaaatctgccaacgttgatttcactgtggacaacaatggactttatactgagcctcgccccattggcacccgttacctt

SEQ ID NO: 1043 - DNA, 2208 bp, synthetic construct
  source 1..2208: mol_type = other DNA; note = Description of Artificial Sequence: Synthetic polynucleotide
atggctgccgatggttatcttccagattggctcgaggacaacctctctgagggcattcgcgagtggtgggacttgaaacctggagccccgaaacctaaagccaaccagcaaaagcaggacgacggccggggtctggtgcttcctggctacaagtacctcggacccttcaacggactcgacaagggggagcccgtcaacgcggcggacgcagcggccctcgagcacgacaaggcctacgaccagcagctcaaagcgggtgacaatccgtacctgcggtataaccacgccgacgccgagtttcaggagcgtctgcaagaagatacgtcttttgggggcaacctcgggcgagcagtcttccaggccaagaagcgggttctcgaaccttttggtctggttgaggaaggcgctaagacggctcctggaaagaaacgtccggtagagcagtcgccacaagagccagactcctcctcgggcatcggcaagacaggccagcagcccgctaaaaagagactcaattttggtcagactggcgactcagagtcagtccccgacccacaacctctcggagaacctccagcaacccccgctgctgtgggacctactacaatggcttcaggcggtggcgcaccaatggcagacaataacgaaggcgccgacggagtgggtaatgcctcaggaaattggcattgcgattccacatggctgggcgacagagtcatcaccaccagcacccgcacctgggccttgcccacctacaataaccacctctacaagcaaatctccagtgcttcaacgggggccagcaacgacaaccactacttcggctacagcaccccctgggggtattttgatttcaacagattccactgccacttttcaccacgtgactggcagcgactcatcaacaacaattggggattccggcccaagagactcaacttcaagctcttcaacatccaagtcaaggaggtcacgacgaacgatggcgtcacgaccatcgctaataaccttaccagcacggttcaagtcttctcggattcagagtaccaactgccgtacgtcctcggctctgcgcaccagggctgcctccctccgttcccggcggacgtgttcatgattccgcagtacggctacctaacgctcaacaatggcagccaggccgtgggacgttcatccttttactgcctggaatatttcccttctcagatgctgagaacgggcaacaactttaccttcagctacacctttgaggaagtgcctttccacagcagctacgcgcacagccagagcctggaccggctgatgaatcctctcatcgaccaatacctgtattacctgaacagaactcaaaatcagtccggaagtgcccaaaacaaggacttgctgtttagccgtgggtctccagctggcatgtctgttcagcccaaaaactggctacctggaccctgttatcggcagcagcgcgtttctaaaacaaaaacagacaacaacaacagcaattttacctggactggtgcttcaaaatataacctcaatgggcgtgaatccatcatcaaccctggcactgctatggcctcacacaaagacgacgaagacaagttctttcccatgagcggtgtcatgatttttggaaaagagagcgccggagcttcaaatactgcattggacaatgtcatgatcacagatgaagaggaaattaaagccactaaccctgtggccaccgaaagatttgggaccgtggcagtcaatttccagagcagcagcacagaccccgcgaccggagatgtgcatgttatgggagccttacctggcatggtgtggcaagacagagacgtatacctgcagggtcccatttgggccaaaattcctcacacggatggacactctcacccgtctcctctcatgggcggctttggacttaagcacccgcctcctcaaatcctcatcaaaaacacgcctgttcctgcgaatcctccggcagagttttcggctacaaagtttgcttcattcatcacccagtactccacaggacaagtgagtgtggaaattgaatgggagctgcagaaagaaaacagcaagcgctggaatcccgaagtgcagtacacatccaattatgcaaaatctgccaacgttgatttcactgtggacaacaatggactttatactgagcctcgccccattggcacccgttaccttacccgtcccttg

SEQ ID NO: 1044 - DNA, 2208 bp, synthetic construct
  source 1..2208: mol_type = other DNA; note = Description of Artificial Sequence: Synthetic polynucleotide
atggctgccgatggttatcttccagattggctcgaggacaacctctctgagggcattcgcgagtggtgggacttgaaacctggagccccgaaacctaaagccaaccagcaaaagcaggacgacggccggggtctggtgcttcctggctacaagtacctcggacccttcaacggactcgacaagggggagcccgtcaacgcggcggacgcagcggccctcgagcacgacaaggcctacgaccagcagctcaaagcgggtgacaatccgtacctgcggtataaccacgccgacgccgagtttcaggagcgtctgcaagaagatacgtcttttgggggcaacctcgggcgagcagtcttccaggccaagaagcgggttctcgaaccttttggtctggttgaggaaggcgctaagacggctcctggaaagaaacgtccggtagagcagtcgccacaagagccagactcctcctcgggcatcggcaagacaggccagcagcccgctaaaaagagactcaattttggtcagactggcgactcagagtcagtccccgacccacaacctctcggagaacctccagcaacccccgctgctgtgggacctactacaatggcttcaggcggtggcgcaccaatggcagacaataacgaaggcgccgacggagtgggtaatgcctcaggaaattggcattgcgattccacatggctgggcgacagagtcatcaccaccagcacccgcacctgggccttgcccacctacaataaccacctctacaagcaaatctccagtgcttcaacgggggccagcaacgacaaccactacttcggctacagcaccccctgggggtattttgatttcaacagattccactgccacttttcaccacgtgactggcagcgactcatcaacaacaattggggattccggcccaagagactcaacttcaagctcttcaacatccaagtcaaggaggtcacgacgaacgatggcgtcacgaccatcgctaataaccttaccagcacggttcaagtcttctcggattcagagtaccaactgccgtacgtcctcggctctgcgcaccagggctgcctccctccgttcccggcggacgtgttcatgattccgcagtacggctacctaacgctcaacaatggcagccaggccgtgggacgttcatccttttactgcctggaatatttcccttctcagatgctgagaacgggcaacaactttaccttcagctacacctttgaggaagtgcctttccacagcagctacgcgcacagccagagcctggaccggctgatgaatcctctcatcgacctatacctgtattacctgaacagaactcaaaatcagtccggaagtgcccaaaacaaggacttgctgtttagccgtgggtctccagctggcatgtctgttcagcccaaaaactggctacctggaccctgttatcggcagcagcgcgtttctaaaacaaaaacagacaacaacaacagcaattttacctggactggtgcttcaaaatataacctcaatgggcgtgaatccatcatcaaccctggcactgctatggcctcacacaaagacgacgaagacaagttctttcccatgagcggtgtcatgatttttggaaaagagagcgccggaacttcaaatactgcattggacaatgtcatgatcacagatgaagaggaaattaaagccactaaccctgtggccaccgaaagatttgggaccgtggcagtcaatttccagagcagcagcacagaccccgcgaccggagatgtgcatgttatgggagccttacctggcatggtgtggcaagacagagacgtatacctgcagggtcccatttgggccaaaattcctcacacggatggacactttcacccgtctcctctcatgggcggctttggacttaagcacccgcctcctcaaatcctcatcaaaaacacgcctgttcctgcgaatcctccggcagagttttcggctacaaagtttgcttcattcatcacccagtactccacaggacaagtgagtgtggaaattgaatgggagctgcagaaagaaaacagcaagcgctggaatcccgaagtgcagtacacatccaattatgcaaaatctgccaacgttgatttcactgtggacaacaatggactttatactgagcctcgccccattggcacccgttaccttacccgtcccttg

SEQ ID NO: 1045 - DNA, 2208 bp, synthetic construct
  source 1..2208: mol_type = other DNA; note = Description of Artificial Sequence: Synthetic polynucleotide
atggctgccgatggttatcttccagattggctcgaggacagcctctctgagggcattcgcgagtggtgggacttgaaacctggagccccgaaacctaaagccaaccagcaaaagcaggacgacggccggggtctggtgcttcctggctacaagtacctcggacccttcaacggactcgacaagggggagcccgtcaacgcggcggacgcagcggccctcgagcacgacaaggcctacgaccagcagctcaaagcgggtgacaatccgtacctgcggtataaccacgccgacgccgagtttcaggagcgtctgcaagaagatacgtcttttgggggcaacctcgggcgagcagtcttccaggccaagaagcgggttctcgaaccttttggtctggttgaggaaggcgctaagacggctcctggaaagaaacgtccggtagagcagtcgccacaagagccagactcctcctcgggcatcggcaagacaggccagcagcccgctaaaaagagactcaattttggtcagactggcgactcagagtcagtccccgacccacaacctctcggagaacctccagcaacccccgctgctgtgggacctactacgatggcttcaggcggtggcgcaccaatggcagacaataacgaaggcgccgacggagtgggtaatgcctcaggaaattggcattgcgattccacatggctgggcgacagagtcatcaccaccagcacccgcacctgggccttgcccacctacaataaccacctctacaagcaaatctccagtgcttcaacgggggccagcaacgacaaccactacttcggctacagcaccccctgggggtattttgatttcaacagattccactgccacttttcaccacgtgactggcagcgactcatcaacaacaattggggattccggcccaagagactcaacttcaagctcttcaacatccaagtcaaggaggtcacgacgaacgatggcgtcacgaccatcgctaataaccttaccagcacggttcaagtcttctcggattcagagtaccaactgccgtacgtcctcggctctgcgcaccagggctgcctccctccgttcccggcggacgtgttcatgattccgcagtacggctacctaacgcccaacaatggcagccaggccgtgggacgttcatccttttactgcctggaatatttcccttctcagatgctgagaacgggcaacaactttaccttcagctacacctttgaggaagtgcctttccacagcagctacgcgcacagccagagcctggaccggctgatgaatcctctcatcgaccaataccagtattacctgaacagaactcaaaatcagtccggaagtgcccaaaacaaggacttgctgtttagccgtgggtctccagctggcatgtctgttcagcccaaaaactggctacctggaccctgttatcggcagcagcgcgtttctaaaacaaaaacagacaacaacaacagcaattttacctggactggtgcttcaaaatataacctcaatgggcgtgaatccatcatcaaccctggcactgctatggcctcacacaaagacgacgaagacaagttctttcccatgagcggtgtcatgatttttggaaaagagagcgccggagcttcaaatactgcattggacaatgtcatgatcacagatgaagaggaaattaaagccactaaccctgtggccaccgaaagatttgggaccgtggcagtcaatttccagagcagcagcacagaccccgcgaccggagatgtgcatgttatgggagccttacctggcatggtgtggcaagacagagacgtatacctgcagggtcccatttgggccaaaattcctcacacggatggacactttcacccgtctcctctcatgggcggctttggacttaagcacccgcctcctcaaatcctcatcaaaaacacgcctgttcctgcgaatcctccggcagagttttcggctacaaagtttgcttcattcatcacccagtactccacaggacaagtgagtgtggaaattgaatgggagctgcagaaagaaaacagcaagcgctggaatcccgaagtgcagtacacatccaattatgcaaaatctgccaacgttgatttcactgtggacaacaatggactttatactgagcctcgccccattggcacccgttaccttacccgtcccttg

SEQ ID NO: 1046 - DNA, 2208 bp, synthetic construct; identical to SEQ ID NO: 1037
  source 1..2208: mol_type = other DNA; note = Description of Artificial Sequence: Synthetic polynucleotide

SEQ ID NO: 1047 - DNA, 2205 bp, synthetic construct
  source 1..2205: mol_type = other DNA; note = Description of Artificial Sequence: Synthetic polynucleotide
atggctgccgatggttatcttccagattggctcgaggacactctctctgaaggaataagacagtggtggaagctcaaacctggcccaccaccaccaaagcccgcagagcggcataaggacgacagcaggggtcttgtgcttcctgggtacaagtacctcggacccttcaacggactcgacaagggagagccggtcaacgaggcagacgccgcggccctcgagcacgacaaagcctacgaccggcagctcgacagcggagacaacccgtacctcaagtacaaccacgccgacgcggagtttcaggagcgccttaaagaagatacgtcttttgggggcaacctcggacgagcagtcttccaggcgaaaaagagggttcttgaacctctgggcctggttgaggaacctgttaagacggctccgggaaaaaagaggccggtagagcactctcctgtggagccagactcctcctcgggaaccggaaaggcgggccagcagcctgcaagaaaaagattgaattttggtcagactggagacgcagactcagtacctgacccccagcctctcggacagccaccagcagccccctctggtctgggaactaatacgatggctacaggcagtggcgcaccaatggcagacaataacgagggcgccgacggagtgggtaattcctcgggaaattggcattgcgattccacatggatgggcgacagagtcatcaccaccagcacccgaacctgggccctgcccacctacaacaaccacctctacaaacaaatttccagccaatcaggagcctcgaacgacaatcactactttggctacagcaccccttgggggtattttgacttcaacagattccactgccacttttcaccacgtgactggcaaagactcatcaacaacaactggggattccgacccaagagactcaacttcaagctctttaacattcaagtcaaagaggtcacgcagaatgacggtacgacgacgattgccaataaccttaccagcacggttcaggtgtttactgactcggagtaccagctcccgtacgtcctcggctcggcgcatcaaggatgcctcccgccgttcccagcagacgtcttcatggtgccacagtatggatacctcaccctgaacaacgggagtcaggcagtaggacgctcttcattttactgcctggagtactttccttctcagatgctgcgtaccggaaacaactttaccttcagctacacttttgaggacgttcctttccacagcagctacgctcacagccagagtctggaccgtctcatgaatcctctcatcgaccagtacctgtattacttgagcagaacaaacactccaagtggaaccaccacgcagtcaaggcttcagttttctcgggccggagcgagtgacattcgggaccagtctaggaactggcttcctggaccctgttaccgccagcagcgagtatcaaagacatctgcggataacaacaacagtgaatactcgtggactggagctaccaagtaccacctcaatggcagagactctctggtgaatccgggcccggccatggcaagccacaaggacgatgaagaaaagttttttcctcagagcggggttctcatctttgggaagcaaggctcagagaaaacaaatgtggacattgaaaaggtcatgattacagacgaagaggaaatcaggacaaccaatcccgtggctacggagcagtatggttctgtatctaccaacctccagagaggcaacagacaagcagctaccgcagatgtcaacacacaaggcgttcttccaggcatggtctggcaggacagagatgtgtaccttcaggggcccatctgggcaaagattccacacacggacggacattttcacccctctcccctcatgggtggattcggacttaaacaccctcctccacagattctcatcaagaacaccccggtacctgcgaatccttcgaccaccttcagtgcggcaaagtttgcttccttcatcacacagtactccacgggacaggtcagcgtggagatcgagtgggagctgcagaaggaaaacagcaaacgctggaatcccgaaattcagtacacttccaactacaacaagtctgttaatgtggactttactgtggacactaatggcgtgtattcagagcctcgccccattggcaccagatacctgactcgtaatctg

SEQ ID NO: 1048 - protein, 736 aa, synthetic construct
  source 1..736: note = Description of Artificial Sequence: Synthetic polypeptide
MAADGYLPDWLEDNLSEGIREWWALKPGAPQPKANQQHQDNARGLVLPDYKYLGPGNGLDKGEPVNAADVAALEHDKAYDQQLKAGDNPYLKYNHADAEFQERLKEDTSFGGNLGRAVFQAKKRLLEPLGLVEEAAKTAPGKKRPVEQSPQEPDSSAGIGKSGAQPAKKRLNFGQTGDTESVPDPQPIGEPPAAPSGVGSLTMASGGGAPVADNNEGADGVGSSSGNWHCDSQWLGDGVITTSTRTWALPTYNNHLYKQISNSTSGGSSNDNAYFGYSTPWGYFDFNRFHCHFSPRDWQRLINNNWGFRPKRLNFKLFNIQVKEVTDNNGVKTIANNLTSTVQVFTDSDYQLPYVLGSAHEGCLPPFPADVFMIPQYGYLTLNDGSQAVGRSSFYCLEYFPSQMLRTGNNFQFSYEFENVPFHSSYAHSQSLDRLMNPLIDQYLHYLPKTINGSGQNQQTLKFSVAGPSNMAVQGRNYIPGPSYRQQRVSTTVTQNNNSEFAWPGASSWALNGRNSLMNPGPAMASYKEGEDSFFPLSGSLIFGKQGTGRDNVDADKVMITNEEEIKTTNPVATESYGQVATNHQSAQAQAQTGWVQNQGILPGMVWQDRDVYLQGPIWAKIPHTDGNFHPSPLMGGFGMKHPPPQTLIKNTPVPADPPTAFNKDKLNSFITQYSTGQVSVEIEWELQKENSKRWNPEIQYTSNYYKSNNVEFAVNTEGVYSEPRPIGTRYLTRNL

SEQ ID NO: 1049 - protein, 736 aa, synthetic construct
  source 1..736: note = Description of Artificial Sequence: Synthetic polypeptide
MAADGYLPDWLEDNLSEGIREWWALKPGAPQPKANQQHQDNARGLVLPGYKYLGPGNGLDKGEPVNAADAAALEHDKAYDQQLKAGDNPYLKYNHADAEFQERLKEDTSFGGNLGRAVFQAKRRLLEPLGLVEEAAKTAPGKKRPVEQSPQEPDSSAGIGKSGAQPAKKRLNFGQTGDTESVPDPQPIGEPPAAPSGVGSLTMASGGGAPVADNNEGADGVGSSSGNWHCDSQWLGDRVITTSTRTWALPTYNNHLYKQISNSTSGGSSNDNAYFGYSTPWGYFDFNRFHCHFSPRDWQRLINNNWGFRPKRLNFKLFNIQIKEVTDNNGVKTIANNLTSTVQVFTDLDYQLPYVLGSAHEGCLPPFPADVFMIPQYGYLTLNDGSQAVGRSSFYCLEYFPSQMLRTGNNFQFSYEFENVPFHSSYAHSQSLDRLMNPLIDQYLHYLSKTINGSGQNQQTLKFSVAGPSNMAVQGRNYIPGPSYRQQRVSTTVTQNNNSEFAWPGASSWALNGRNSLMNPGPAMASYKEGEDSFFPLSGSLIFGKQGTGRDNVDADKVMITNEEEIKTTNPVATESYGQVATNHQSAQAQAQTGWVQNQGILPGMVWQDRDVYLQGPIWAKIPHTDGNFHPSPLMGGFGMKHPPPQTLIKNTPVPADPPTAFNKDKLNSFITQYSTGQVSVEIEWELQKENSKRWNPEIQYTSNYYKSNNVEFAVNTEGVYSEPRPIGTRYLTRNL

SEQ ID NO: 1050 - protein, 736 aa, synthetic construct
  source 1..736: note = Description of Artificial Sequence: Synthetic polypeptide
MAADGYLPDWLEDNLSEGIREWWALKPGAPQPKANQQHQDNARGLVLPGYKYLGPGNGLDKGEPVSAADAAALEHDKAYDQQLKAGDNPYLKYNHADAEFQERLKEDTSFGGNLGRAVFQAKKRLLEPLGLVEEAAKTAPGKKRPVEQSPQEPDSSAGIGKSGAQPAKKRLNFGQTGDTESVSDPQPIGEPPAAPSGVGSLTMASGGGAPVADNNEGADGVGSSSGNWHCDSQWLGDRVITTSTRTWALPTYNNHLYKQISNSTSGGSSNDNAYFGYSTPWGYFDFNRFHCHFSPRDWQRLINNNWGFRPKRLNFKLFNIQVKEVTDNNGVKTIANNLTSTVQVFTDSDYQLPYVLGSAHEGCLPPSPADVFMIPQYGYLTLNDGSQAVGRSSFYCLEYFPSQMLRTGNNFQFSYEFENVPFHSSYAHSQSLDRLMNPLIDQYLHYLSKTINGSGQNQQTLKFSVAGPSNMAVQGRNYIPGPSYRQQRVSTTVTQNNNSEFAWPGASSWALNGRNSLMNPGPAMASYKEGEDSFFPLSGSLIFGKQGTGRDDVDADKVIITNEEEIKTTNPVATESYGQVATNHQSAQAQAQTGWVQNQGILPGMVWQDRDVYLQGPIWAKIPHTDGNFHPSPLMGGFGMKHPPPQTLIKNTPVPADPPTAFNKDKLNSFITQYSTGQVSVEIEWELQKENSKRWNPEIQYTSNYYKSNNVEFAVNTEGVYSEPRPIGTRYLTRNL

SEQ ID NO: 1051 - protein, 736 aa, synthetic construct
  source 1..736: note = Description of Artificial Sequence: Synthetic polypeptide
MAADGYLPDWLEDNLSEGIREWWALKPGAPQPKANQQHQDNARGLVLPGYKYLGPGNGLDKGEPVNAADAAALEHDKAYDQQLKAGDNPYLKYNHAGAEFQERLKEDTSFGGNLGRAVFQAKKRLLEPLGLVEEAAKTAPGKKRPVEQSPQEPDSSAGIGKSGAQPAKKRLNFGQTGDTESVPDPQPIGEPPAAPSGVGSLTMASGGGAPVADNNEGAGGVGSSSGNWHCDSQWLGDRVVTTSTRTWALPTYNNHLYKQISNSTSGGSSNDNAYFGYSTPWGYFDFNRFHCHFSPRDWQRLINNNWGFRPKRLNFKLFNIQVKEVTDNNGVKTIANNLTSTVQVFTDSDYQLPYVLGSAHGGCLPPFPADVFMIPQYGYLTLNDGSQAVGRSSFYCLEYFPSQMLRTGNNFQFSYEFENVPFHSSYAHSQSLDRLMNPLIDQYLHYLSKTINGSGQNQQTLKFSVAGPSNMAVQGRSYIPGPSYRQQRVSTTVTQNNNSEFAWPGASSWALNGRNSLMNPGPAMASYKEGEDSFFPLSGSLIFGKQGTGRDNVDADKVMITNEEEIKTTNPVATESYGQVATNHQSAQAQAQTGWVQNQGILPGMVWQDRDVYLQGPIWAKIPHTDGNFHPSPLMGGFGMKHPPPQTLIKNTPVPADPPTAFNKDKLNSFITQYSTGQVSVEIEWELQKENSKRWNPEIQYTSNYYKSNNVEFAVNTEGVYSEPRPIGTRYLTRNL

SEQ ID NO: 1052 - protein, 736 aa, synthetic construct
  source 1..736: note = Description of Artificial Sequence: Synthetic polypeptide
MAADGYLPDWLEDNLSEGIREWWALKPGAPQPKANQQHQDNARGLVLPGYKYLGPGNGLDKGEPVNAADAAALEHDKAYDQQLKAGDNPYLKYNHADAEFQERLKEDTSFGGNLGRAVFQAKKRLLEPLGLVEEAAKTAPGKKRPVEQSPQEPDSSAGIGKSGAQPAKKRLNFGQTGDTESVPDPQPIGEPPAAPSGVGSLTMASGGGAPVADNNEGADGVGSSSGNWHCDSQWLGDRVVTTSTRTWALPTYNNHLYKQISNSTSGGSSNDNAYFGYSTPWGYFDFNRFHCHFSPRDWQRLINNNWGFRPKRLNFKLFNIQVKEVTDNNGVKTIANNLTSTVQVFTDSDYQLPYVLGSAHEGCLPPFPADVFMIPQYGYLTLNDGSQAVGRSSFYCLEYFPSQMLRTGNNFQFSYEFENVPFHSSHAHSQSLDRLMNPLIDQYLHYLSKTINGSGQNQQTLKFSVAGHSNMAVQGRNYIPGPSYRQQRVSTTVTQNNNSEFAWPGASSWALNGRNSLMNPGPAMASYKEGEDSFFPLSGSLIFGKQGTGRDNVDADKVMITNEEEIKTTNPVATESYGQVATNHQSAQAQAQTGWVQNQGILPGMVWQDRDVYLQGPIWAKIPHTDGNFHPSPLMGGFGMKHPPPQTLIKNTPVPADPPTAFNKDKLNSFITQYSTGQVSVEIGWELQKENSKRWNPEIQYTSNYYKSNNVEFAVNTEGVYSEPRPIGTRYLTRNL

SEQ ID NO: 1053 - protein, 736 aa, synthetic construct
  source 1..736: note = Description of Artificial Sequence: Synthetic polypeptide
MAADGYLPDWLEDNLSEGIREWWALKPGAPQPKANQQHQDNARGLVLPGYKYLGPGNGLDKGEPVNAADAAALEHDKAYDQQLKAGDNPYLKYNHADAEFQERLKEDTSFGGNLGRAVFQAKKRLLEPLGLVEEAAKTAPGKKRPVEQSPQEPDSSAGIGKSGAQPAKKRLNFGQTGDTESVPDPQPIGEPPAAPSGVGSLTMASGGGAPVADNNEGADGVGSSSGNWHCDSQWLGDRVITTSTRTWALPTYNNRLYKQISNSTSGGSSNDNAYFGYSTPWGYFDFNRFHCHFSPRDWQRLINNNWGFRPKRLNFKPFNIQVKEVTDNNGVKTIANNLTSTVQVFTDSDYQLPYVLGSAHEGCLPPFPADVFMIPQYGYLTLNDGSQAVGRSSFYCLEYFPSQMLRTGNNFQFSYEFENVPFHSSYAHSQSLDRLMNPLIDQYLHYLSKTINGSGQNQQTLKFSVAGPSNMAVQGRNYIPGPSYRQQRVSTTVTQNNNSEFAWPGASSWALNGRNSLMNPGPAMASYKEGEDSFFPLSGSLIFGKQGTGRDNVDADKVMITNEEEIKTTNPVATESYGQVATNHQSAQAQAQTGWVQNQGILPGMVWQDRDVYLQGPIWAKIPHTDGNFHPSPLMGGFGMKHPPPQTLIKNTPVPADPPTAFNKDKLNSFITQYSTGQVSVEIEWELQKENSKRWNPEIQYTSNYYKSNNVEFAVNTEGVYSEPRPIGTRYLTRNL

SEQ ID NO: 1054 - protein, 736 aa, synthetic construct
  source 1..736: note = Description of Artificial Sequence: Synthetic polypeptide
MAADGYLPDWLEDNLSEGIREWWALKPGAPQPKANQQHQDNARGLVLPGYKYLGPGNGLDKGEPVNAADAAALEHDKAYDQQLKAGDNPYLKYNHADAEFQERLKEDTSFGGNLGRAVFQAKKRLLEPLGLVEEAAKTAPGKKRPVEQSPQEPDSSAGIGKSGAQPAKKRLNFGQTGDTESVPDPQPIGEPPAAPSGVGSLTMASGGGAPVADNNEGADGVGSSSGNWHCDSQWLGDRVITTSTRTWALPTYNNHLYKQISNSTSGGSSNDNAYFGYSTPWGYFDFNRFHCHFSPRDWQRLINNNWGFRPKRLNFKLFNIQVKEVTDNNGVKTIANNLTSTVQVFTDSDYQLPYVLGSAHEGCLPPFPADVFMIPQYGYLTLNDGSQAVGRSSFYCLEYFPSQMLRTGNNFQFSYEFENVPFHSSYAHSQSLDRLMNPLIDQYLHYLSKTINGSGQNQQTLKFSVAGPSNMAVQGRNYIPGPSYRQQRVSTTVTQNNNSEFAWPGASSWALNGRNSLMNPGPAMASYKEGEDSFFPLSGSLIFGKQGTGRDNVDADKVMITNEEEIKTTNPVATESYGQVATNHQSAQAQAQTGWVQNQGILPGMVWQDRDVYLQGPIWAKIPHTDGNFHPSPLMGGFGMKHPPPQTLIKNTPVPADPPTAFNKDKLNSFITQYSTGQVSVEIEWELQKENSKRWNPEIQYTSNYYKSNNVEFAVNTEGVYSEPRPIGTRYLTRNL

SEQ ID NO: 1055 - protein, 736 aa, synthetic construct; identical to SEQ ID NO: 1054
  source 1..736: note = Description of Artificial Sequence: Synthetic polypeptide

SEQ ID NO: 1056 - protein, 736 aa, synthetic construct
  source 1..736: note = Description of Artificial Sequence: Synthetic polypeptide
MAADGYLPDWLEDNLSEGIREWWDLKPGAPKPKANQQKQDDGRGLVLPGYKYLGPFNGLDKGEPVNAADAAALEHDKAYDQQLKAGDNPYLRYNHADAEFQERLQEDTSFGGNLGRAVFQAKKRVLEPFGLVEEGAKTAPGKKRPVEQSPQEPDSSSGIGKSGQQPAKKRLNFGQTGDSESVPDPQPLGEPPATPAALGPTTMASGGGAPMADNNEGADGVGNASGNWHCDSTWLGDRVITTSTRTWALPTYNNHLYKQISSASTGASNDNHYFGYSTPWGYFDFNRFHCHFSPRDWQRLINNNWGFRPKRLNFKLFNIQVKEVTTNDGVTTIANNLTSTVQVFSDSEYQLPYVLGSAHQGCLPPFPADVFMIPQYGYLTLNNGSKAVGRSSFYCLEYFPSQMLRTGNNFTFSYTFEEVPFHSSYAHSQSLDRLMNPLIDQYLYYLNRTQNQSGSAQNKDLLFSRGSPAGMSVQPKNWLPGPCYRQQRVSKTKTDNNNSNFTWTGASKYNLNGRESIINPGTAMASHKDDEDKFFPMSGVMIFGKESAGASNTALDNVMITDEEEIKATNPVATERFGTVAVNFQSSSTDPATGDVHVMGALPGMVWQDRDVYLQGPIWAKIPHTDGHFHPSPLMGGFGLKHPPPQILIKNTPVPANPPAEFSATKFASFITQYSTGQVSVEIEWELQKENSKRWNPEVQYTSNYAKSANVDFTVDNNGLYTEPRPIGTRYLTRPL

SEQ ID NO: 1057 - protein, 736 aa, synthetic construct
  source 1..736: note = Description of Artificial Sequence: Synthetic polypeptide
MAADGYLPDWLEDNLSEGIREWWDLKPGAPKPKANQQKQDDGRGLVLPGYKYLGPFNGLDKGEPVNAADAAALEHDKAYDQQLKAGDNPYLRYNHADAEFQERLQEDTSFGGNLGRAVFQAKKRVLEPLGLVEEGAKTAPGKKRPVEQSPQEPDSSSGIGKTGQQPAKKRLNFGQTGDSESVPDPQPLGEPPATPAAVGPTTMASGGGAPMADNNEGADGVGNASGNWHCDSTWLGDRVITTSTRTWALPTYNNHLYKQISSTSTGASNDNHYFGYSTPWGYFDFNRFHCHFSPRDWQRLINNNWGFRPKRLNFKLFNIQVKEVTTNDGVTTIANNLTSTVQVFSDSEYQLPYVLGSAHQGCLPPFPADVFMIPQYGYLTLNNGSQAVGRSSFYCLEYFPSQMLRTGNNFTFSYTFEEVPFHSSYAHSQSLDRLMNPLIDQYLYYLNRTQNQSGSAQNKDLLFSRGSPAGMSVQPKNWLPGPCYRQQRVSKTKTDNNNSNFTWTGASKYNLNGRESIINPGTAVASHKDDEDKFFPMSGVMIFGKESAGASNTALDNVMITDEEEIKATNPVATERFGTVAVNFQSSSTDPATGDVHAMGALPGMVWQDRDVYLQGPIWAKIPHTDGHFHPSPLMGGFGLKNPPPQILIKNTPVPANPPAEFSATKFASFITQYSTGQVSVEIEWELQKENSKRWNPEVQYTSNYAKSANVDFTVDNNGLYTEPRPIGTRYLTRPL

SEQ ID NO: 1058 - protein, 736 aa, synthetic construct
  source 1..736: note = Description of Artificial Sequence: Synthetic polypeptide
MAADGYLPDWLEDNLSEGIREWWALKPGAPQPKANQQHQDNARGLVLPGYKYLGPGNGLDKGEPVNAADAAALEHDKAYDQQLKAGDNPYLKYNHADAEFQERLKEDTSFGGNLGRAVFQAKKRLLEPLGLVEEAAKTAPGKKRPVEQSPQEPDSSAGIGKSGAQPAKKRLNFGQTGDTESVPDPQPIGEPPAAPSGVGSLTMASGGGAPVADNNEGADGVGSSSGNWHCDSQWLGDRVITTSTRTWALPTYNNHLYKQISNSTSGGSSNDNAYFGYSTPWGYFDFNRFHCHFSPRDWQRLINNNWGFRPKRLNFKLFNIQVKEVTDNNGVKTIANNLTSTVQVFTDSDYQLPYVLGSAHEGCLPPFPADVFMIPQYGYLTLNDGSQAVGRSSFYCLEYFPSQMLRTGNNFQFGYEFENVPFHSSYAHSQSLDRLMNPLIDQYLYYLSKTINGSGQNQQTLKFSVAGPSNMAVQGRNYIPGPSYRQQRVSTTVTQNNNSEFAWPGASSWALNGRNSLMNPGPAMASHKEGEDRFFPLSGSLIFGKQGTGRDNVDADKVMITNEEEIKTTNPVATESYGQVATNHQSAQAQAQTGWVQNQGILPGMVWQDRDVYLQGPIWAKIPHTDGNFHPSPLMGGFGMKHPPPQILIKNTPVPADPPTAFNKDKLNSFITQYSTGQVSVEIEWELQKENSKRWDPEIQYTSNYYKSNNVEFAVNTEGVYSEPRPIGTRYLTRNL

SEQ ID NO: 1059 - protein, 736 aa, synthetic construct
  source 1..736: note = Description of Artificial Sequence: Synthetic polypeptide
MAADGYLPDWLEDNLSEGIREWWALKPGAPQPKANQQHQDNARGLVLPGYKYLGPGNGLDKGEPVNAADAAALEHDKAYDQQLKAGDNPYLKYNHADAEFQERLKEDTSFGGNLGRAVFQAKKRLLEPLGLVEEAAKTAPGKKRPVEQSPQEPDSSAGIGKSGAQPAKKRLNFGQTGDTESVPDPQPIGEPPAAPSGVGSLTMASGGGAPVADNNEGADGVGSSSGNWHCDSQWLGDRVITTSTRTWALPTYNNHLYKQISNSTSGGSSNDNAYFGYSTPWGYFDFNRFHCRFSPRDWQRLINNNWGFRPKRLNFKLFNIQVKEVTDNNGVKTIANNLTSTVQVFTDSDYQLPYVLGSAHEGCLPPFPADVFMIPQYGYLTLNDGSQAVGRSSFYCLEYFPSQMLRTGNNFQFSYEFENVPFHSSYAHSQSLDRLMNPLIDQYLYYLSKTINGSGQNQQTLKFSVAGPSNMAVQGRNYIPGPSYRQQRVSTTVTQNNNSEFAWPGASSWALNGRNSLMNPGPAMASHKEGEDRFFPLSGSLIFGKQGTGRDNVDADKVMITNEEEIKTTNPVATESYGQVATNHQSAQAQAQTGWVQNQGILPGMVWQDRDVYLQGPIWAKIPHTDGNFHPSPLMGGFGMKHPPPQILIKNAPVPADPPTAFNKDKLNSFITQYSTGQVSVEIEWELQKENSKRWNPEIQYTSNYYKSNNVEFAVNTEGVYSEPRPIGTRYLTRNL

SEQ ID NO: 1060 - protein, 736 aa, synthetic construct
  source 1..736: note = Description of Artificial Sequence: Synthetic polypeptide
MAADGYLPDWLEDNLSEGIREWWALKPGAPQPKANQQHQDNARGLVLPGYKYLGPGNGLDKGEPVSAADAAALEHDKAYDQQLKAGDNPYLKYNHADAEFQERLKEDTSFGGNLGRAVFQAKKRLLEPLGLVEEAAKTAPGKKRPVEQSPQEPDSSAGIGKSGAQPAKKRLNFGQTGDTESVPDPQPIGEPPAAPSGVGSLTMASGGGAPVADNNEGADGVGSSSGNWHCDSQWLGDRVITTSTRTWALPTYNNHLYKQISNSTSGGSSNDNAYFGYSTPWGYFDFNRFHCHFSPRDWQRLINNNWGFRPKRLNFKLFNIQVKEVTDNNGVKTIANNLTSTVQVFTDSDYQLPYVLGSAHEGCLPPFPADVFMIPQYGYLTLNDGSQAVGRSSFYCLEYFPSQMLRTGNNFQFSYEFENVPFHSSYAHSQSLDRLMNPLIDQYLYYLSKTINGSGQNQQTLKFSVAGPSNMAVQGRNYIPGPSYRQQRVSTTVTQNNNSEFAWPGASSWALNGRNSLMNPGPAMASHKEGEDRFFPLSGSLIFGKQGTGRDNVDADKVMITNEEEIKTTNPVATESYGQVATNHQSAQAQAQTGWVQNQGILPGMVWQDRDVYLQGPIWAKIPHTDGNFHPSPLMGGFGMKHPPPQILIKNTPVPADPPTAFNKDKLNSFITQYSTGQVSVEIEWELQKENSKRWNPEIQYTSNYYKSNNVEFAVNTEGVYSEPRPIGTRYLTRNL

SEQ ID NO: 1061 - protein, 736 aa, synthetic construct
  source 1..736: note = Description of Artificial Sequence: Synthetic polypeptide
MAADGYLPDWLEDNLSEGIREWWALKPGAPQPKANQQHQDNARGLVLPGYKYLGPGNGLDKGEPVNAADAAALEHDKAYDQQLKAGDNPYLKYNHADAEFQERLKEDTSFGGNLGRAVFQAKKRLLEPLGLVEEAAKTAPGKKRPVEQSPQEPDSSAGIGKSGAQPAKKRLNFGQTGDTESVPDPQPIGEPPAAPSGVGSLTMASGGGAPVADNNEGADGVGSSSGNWHCDSQWLGDRVITTSTRTWALPTYNNHLYKQISNSTSGGSSNDNAYFGYSTPWGYFDFNRFHCHFSPRDWQRLINNNWGFRPKRLNFKLFNIQVKEVTDNNGVKTIANNLTSTVQVFTDSDYQLPYVLGSAHEGCLPPFPADVFMIPQYGYLTLNDGSQAVGRSSFYCLEYFPSQMLRTGNNFQFSYEFENVPFHSSYAHSQSLDRLMNPLIDQYLYYLSKTINGSGQNQQTLKFSVAGPSNTAVQGRNYIPGPSYRQQRVSTTVTQNNNSEFAWPGASSWALNGRNSLMNPGPAMASHKEGEDRFFPLSGSLIFGKQGTGRDNVDADKVMITNEEEIKTTNPVATESYGQVATNHQSAQAQAQTGWVQNQGILPGMVWQDRDVYLQGPIWAKIPHTDGNFHPSPLMGGFGMKHPPPQILIKNTPVPADPPTAFNKDKLNSFITQYSTGQVSVEIEWELQKENSKRWNPEIQYTSNYYKSNNVEFAVNTEGVYSEPRPIGTRYLTRNL

SEQ ID NO: 1062 - protein, 736 aa, synthetic construct
  source 1..736: note = Description of Artificial Sequence: Synthetic polypeptide
MAADGYLPDWLEDNLSEGIREWWALKPGAPQPKANQQHQDNARGLVLPGYKYLGPGNGLDKGEPVNAADAAALEHDKAYDQQLKAGDNPYLKYNHADAEFQERLKEDTSFGGNLGRAVFQAKKRLLEPLGLVEEAAKTAPGKKRPVEQSPQEPDSSAGIGKSGAQPAKKRLNFGQTGDTESVPDPQPIGEPPAAPSGVGSLTMASGGGAPVADNNEGADGVGSSSGNWHCDSQWLGDRVITTSTRTWALPTYNNHLYKQISNSTSGGSSNDNAYFGYSTPWGYFDFNRFHCHFSPRDWQRLINNNWGFRPKRLNFKLFNIQVKEVTDNNGVKTIANNLTSTVQVFTDSDYQLPYVLGSAHEGCLPPFPADVFMIPQYGYLTLNDGSQAVGRSSFYCLEYFPSQMLRTGSNFQFSYEFENVPFHSSYAHSQSLDRLMNPLIDQYLYYLSKTINGSGQNQQTLKFSVAGPSNMAVQGRNYIPGPSYRQQRVSTTVTQNNNSEFAWPGASSWALNGRNSLMNPGPAMASHKEGEDRFFPLSGSLIFGKQGTGRDNVDADKVMITNEEEIKTTNPAATESYGQVATNHQSAQAQAQTGWVQNQGILPGMVWQDRDVYLQGPIWAKIPHTDGNFHPSPLMGGFGMKHPPPQILIKNTPVPADPPTAFNKDKLNSFITQYSTGQVSVEIEWELQKENSKRWNPEIQHTSNYYKSNNVEFAVNTEGVYSEPRPIGTRYLTRNL

SEQ ID NO: 1063 - protein, 736 aa, synthetic construct
  source 1..736: note = Description of Artificial Sequence: Synthetic polypeptide
MAADGYLPDWLEDNLSEGIREWWALKPGAPQPKANQQHQDNARGLVLPGYKYLGPGNGLDKGEPVNAADAAALEHDKAYDQQLKAGDNPYLKYNHADAEFQERLKEDTSFGGNLGRAVFQAKKRLLEPLGLVEEAAKTAPGKKRPVEQSPQEPDSSAGIGKSGAQPAKKRLNFGQTGDTESVPDPQPIGEPPAAPSGVGSLTMASGGGAPVADNNEGADGVGSSSGNWHCDSQWLGDRVITTSTRTWALPTYNNHLYKQISNSTSGGSSNDNAYFGYSTPWGYFDFNRFHCHFSPRDWQRLINNNWGFRPKRLNFRLFNIQVKEVTDNNGVKTIANNLTSTVQVFTDSDYQLPYVLGSAHEGCLPPFPADVFMIPQYGYLTLNDGSQAVGRSSFYCLEYFPSQMLRTGNNFQFSYEFENVPFHSSYAHSQSLDRLMNPLIDQYLYYLSKTINGSGQNQQTLKFSVAGPSNMAVQGRNYIPGPSYRQQRVSTTVTQNNNSEFAWPGASSWALNGRNSLMNPGPAMASHKEGEDRFFPLSGSLIFGKQGTGRDNVDADKVMITNEEEIKTTNPVATESYGQVATNHQSAQAQAQTGWVQSQGILPGMVWQDRDVYLQGPIWAKIPHTDGNFHPSPLMGGFGMKHPPPQILIKNTPVPADPPTAFNKDKLNSFITQYSTGQVSVEIEWELQKENSKRWNPEIQYTSNYYKSNNVEFAVNTEGVYSEPRPIGTRYLTRNL

SEQ ID NO: 1064 - protein, 735 aa, synthetic construct
  source 1..735: note = Description of Artificial Sequence: Synthetic polypeptide
MAADGYLPDWLEDNLSEGIREWWALKPGAPQPKANQQHQDNARGLVLPGYKYLGPGNGLDKGEPVNAADAAALEHDKAYDQQLKAGDNPYLKYNHADAEFQERLKEDTSFGGNLGRAVFQAKKRLLEPLGLVEEAAKTAPGKKRPVEQSPQEPDSSAGIGKSGAQPAKKRLNFGQTGDTESVPDPQPIGEPPAAPSGVGSLTMASGGGAPVADNNEGADGVGSSSGNWHCDSQWLGDRVITTSTRTWALPTYNNHLYKQISNSTSGGSSNDNAYFGYSTPWRYFDFNRFHCHFSPRDWQRLINNWGFRPKRLNFKLFNIQVKEVTDNNGVKTIANNLTSTVQAFTDSDYQLPYVLGSAHEGCLPPFPADVFMIPQYGYLTLNDGSQAVGRSSFYCLEYFPSQMLRTGNNFQFSYEFENVPFHSSYAHSQSLDRLMNPLIDQYLYYLSKTINGSGQNQQTLKFSVAGPSNMAVQGRNYIPGPSYRQQRVSTTVTQNNNSEFAWPGASSWALNGRNSLMNPGPAMASHKEGEDRFFPLSGSLIFGKQGTGRDNVDADKVMITNEEEIKTTNPVATESYGQVATNHQSAQAQAQTGWVQNQGILPGMVWQDRDVYLQGPIWAKIPHTDGNFHPSPLMGGFGMKHPPPQILIKNTPVPADPPTAFNKDELNSFITQYSTGQVSVEIEWELQKENSKRWNPEIQYTSNYYKSNNVEFAVNTEGVYSEPRPIGTRYLTRNL

SEQ ID NO: 1065 - protein, 735 aa, synthetic construct
  source 1..735: note = Description of Artificial Sequence: Synthetic polypeptide
MAADGYLPDWLEDNLSEGIREWWALKPGAPQPKANQQHQDNARGLVLPGYKYLGPGNGLDKGEPVNAADAAALEHDKAYDQQLKAGDNPYLKYNHADAEFQERLKEDTSFGGNLGRAVFQDKKRLLEPLGLVEEAAKTAPGKKRPVEQSPQEPDSSAGIGKSGAQPAKKRLNFGQTGDTESVPDPQPIGEPPAAPSGVGSLTMASGGGAPVADNNEGADGVGSSSGNWHCDSQWLGDRVITTSTRTWALPTYNNHLYKQISNSTSGGSSNDNAYFGYSTPWGYFDFNRFHCHFSPRDWQRLINNWGFRPKRLNFKLFNIQVKEVTDNNGVKTIANNLTSTVQVFTDSDYQLPYVLGSAHEGCLPPFPADVFMIPQYGYLTLNDGSQAVGRSSFYCLEYFPSQMLRTGNNFQFSYEFENVPFHSSYAHSQSLDRLMNPLIDQYLYYLSKTINGSGQNQQTLKFSVAGPSNMAVQGRNYIPGPSYRQQRVSTTVTQNNNSEFAWPGASSWALNGRNSLMNPGPAMASHKEGEDRFFPLSGSLIFGKQGTGRDNVDADKVMITNEEEIKTTNPVATESYGQVATNHQSAQAQAQTGWVQNQGILPGMVWQDRDVYLQGPIWAKIPHTDGNFHPSPLMGGFGMKHPPPQILIKNTPVPADPPTAFNKDKLNSFITQYSTGQVSVEIEWELQKENSKRWNPEIQYTSNYYKSNNVEFAVNTEGVYSEPRPIGTRYLTRNL

SEQ ID NO: 1066 - protein, 736 aa, synthetic construct
  source 1..736: note = Description of Artificial Sequence: Synthetic polypeptide
MAADGYLPDWLEDNLSEGIREWWALKPGAPQPKANQQHQDNARGLVLPGYKYLGPGNGLDKGEPVNAADAAALEHDKAYDQQLKAGDNPYLKYNHADAEFQERLKEDTSFGGNLGRAVFQAKKRLLEPLGLVEEAAKTAPGKKRPVEQSPQEPDSSAGIGKSGAQPAKKRLNFGQTGDTESVPDPQPIGEPPAAPSGVGSLTMASGGGAPVADNNEGADGVGSSSGNWHCDSQWLGDRAITTSTRTWALPTYNNHLYKQISNSTSGGSSNDNAYFGYSTPWGYFDFNRFHCHFSPRDWQRLINNNWGFRPKRLNFKLFNIQVKEVTDNNGVKTIANNLTSTVQVFTDSDYQLPYVLGSAHEGCLPPFPADVFMIPQYGYLTLNDGSQAVGRSSFYCLEYFPSQMLRTGNNFQFSYEFENVPFHSSYAHSQSLDRLMNPLIDQYLYYLSKTINGSGQNQQTLKFSVAGPSNMAVQGRNYIPGPSYRQQRVSTTVTQNNNSEFAWPGASSWALNGRNSLMNPGPAMASHKEGEDRFFPLSGSLIFGKQGTGRDNVDADKVMTTNEEEIKTTNPVATESYGQVATNHQSAQAQAQTGWVQNQGILPGMVWQDRDVYLQGPIWAKIPHTDGNFHPSPLMGGFGMKHPPPQILIKNTPVPADPPTAFNKDKLNSFITQYSTGQVSVEIEWELQKENSKRWNPEIQYTSNYYKSNNVEFAVNTEGVYSEPRPIGTRYLTRNL

SEQ ID NO: 1067 - protein, 736 aa, synthetic construct
  source 1..736: note = Description of Artificial Sequence: Synthetic polypeptide
MAADGYLPDWLEDNLSEGIREWWALKPGAPQPKANQQHQDNARGLVLPGYKYLGPGNGLDKGEPVNAADAAALEHDKAYDQQLKAGDNPYLKYNHADAEFQERLKEDTSFGGNLGRAVFQTKKRLLEPLGLVEEAAKTAPGKKRPVEQSPQEPGSSAGIGKSGAQPAKKRLNFGQTGDTESVPDPQPIGEPPAAPSGVGSLTMASGGGAPVADNNEGADGVGSSSGNWHCDSQWLGDRVITTSTRTWALPTYNNHLYKQISNSTSGGSSNDNAYFGYSTPWGYFDFNRFHCHFSPRDWQRLINNNWGFRPKRLNFKLFNIQVKEVTDNNGVKTIANNLTSTVQVFTDSDYQLPYVLGSAHEGCLPPFPADVFMIPQYGYLTLNDGSQAVGRSSFYCLEYFPSQMLRTGNNFQFSYEFENVPFHSSYAHSQSLDRLMNPLIDQYLHYLSKTINGSGQNQQTLKFSVAGPSNMAVQGRNYIPGPSYRQQRVSTTVTQNNNSEFAWPGASSWALNGRNSLMNPGPAMASHKEGEDRFFPLSGSLIFGKQGTGRDNVDADKVMITNEEEIKTTNPVATESYGQVATNHQSAQAQAQTGWVQNQGILPGMVWQDRDVYLQGPIWAKIPHTDGNFHPSPLMGGFGMKHPPPQILIKNTPVPADPPTAFNKDKLNSFITQYSTGQVSVEIEWELQKENSKRWNPEIQYTSNYYKSNNVEFAVNTEGVYSEPRPIGTRYLTRNL

SEQ ID NO: 1068 - protein, 736 aa, synthetic construct
  source 1..736: note = Description of Artificial Sequence: Synthetic polypeptide
MAADGYFPDWLEDNLSEGIREWWALKPGAPQPKANQQHQDNARGLVLPGYKYLGPGNGLDKGEPVNAADAAALEHDKAYDQQLKAGDNPYLKYNHADAEFQERLKEDTSFGGNLGRAVFQAKKRLLEPLGLVEEAAKTAPGKKRPVEQSPQEPDSSAGIGKSGAQPAKKRLNFGQTGDTESVPDPQPIGESPAAPSGVGSLTMASGGGAPVADNNEGADGVGSSSGNWHCDSQWLGDRVITTSTRTWALPTYNNHLYKQISNSTSGGSSNDNAYFGYSTPWGYFDFNRFHCHFSPRDWQRLINNNWGFRPKRLNFKLFNIQVKEVTDNNGVKTIANNLTSTVQVFTDSDYQLPYVLGSAHEGCLPPFPADVFMIPQYGYLTLNDGSQAVGRSSFYCLEYLPSQMLRTGNNFQFSYEFENVPFHSSYAHSQSLDRLMNPLIDQYLHYLSKTINGSGQNQQTLKFSVAGPSNMAVQGRNYIPGPSYRQQRVSTTVTQNNNSEFAWPGASSWALNGRNSLMNPGPAVASHKEGEDRFFPLSGSLIFGKQGTGRDNVDADKVMITNEEEIKTTNPVATESYGQVATNHQSAQAQAQTGWVQNQGILPGMVWQDRDVYLQGPIWAKIPHTDGNFHPSPLMGGFGMKHPPPQILIKNTPVPADPPTAFNKDKLNSFITQYSTGQVSVEIEWELQKENSKRWNPEIQYTSNYYKSNNVEFAVNTEGVYSEPRPIGTRYLTRNL

SEQ ID NO: 1069 - protein, 736 aa, synthetic construct
  source 1..736: note = Description of Artificial Sequence: Synthetic polypeptide
MAADGYLPDWLEDNLSEGIREWWALKPGAPQPKANQQHQDNARGLVLPGYKYLGPGNGLDKGEPVNAADAAALEHDKAYDQQLKAGDNPYLKYNHADAEFQERLKEDTSFGGNLGRAVFQAKKRLLEPLGPVEEAAKTAPGKKRPVEQSPQEPDSSAGIGKSGAQPAKKRLNFGQTGDTESVPDPQPIGEPPAAPSGVGSLTMASGGGAPVADNNEGADGVGSSSGNWHCDSQWLGDRVITTSTRTWALPTYNNHLYKQISNSTSGGSSNDNAYFGYSTPWGYFDFNRFHCHFSPRDWQRLINNNWGFRPKRLNFKLFNIQVKEVTDNNGVKTIANNLTSTVQVFTDSDYQLPYVLGSAHEGCLPPFPADVFMIPQYGYLTLNDGSQAVGRSSFYCLEYFPSQMLRTGNNFQFSYEFENVPFHSSYAHSQSLDRLMNPLIDQYLYYLSKTINGSGQNQQTLKFSVAGPSNMAVQGRNYIPGPSYRQQRVSTTVTQNNNSEFAWPGASSWALNGRNSLMNPGPAMASHKEGEDRFFPLSGSLIFGKQGTGRDNVDADKVMITNEEEIKTTNPVATESYGQAATNHQSAQAQAQTGWVQNQGILPGMVWQDRDVYLQGPIWAKIPHTDGNFHPSPLMGGFGMKHPPPQILIKNTPVPADPPTAFNKDKLNSFITQYSTGQVSVEIEWELQKENSKRWNPEIQYTSNYYKSNNVEFAVNTEGVYSEPRPIGTRYLTRNL

SEQ ID NO: 1070 - protein, 736 aa, synthetic construct
  source 1..736: note = Description of Artificial Sequence: Synthetic polypeptide
MAADGYLPDWLEDNLSEGIREWWALKPGAPQPKANQQHQDNARGLVLPGYKYLGPGNGLDKGEPVNAADAAALEHDKAYDQQLKAGDNPYLKYNHADAEFQERLKEDTSFGGNLGRAVFQAKKRLLEPLGPVEEAAKTAPGKKRPVEQSPQEPDSSAGIGKSGAQPAKKRLNFGQTGDTESVPDPQPIGEPPAAPSGVGSLTMASGGGAPVADNNEGADGVGSSSGNWHCDSQWLGDRVITTSTRTWALPTYNNHLYKQISNSTSGGSSNDNAYFGYSTPWGYFDFNRFHCHFSPRDWRRLINNNWGFRPKRLNFKLFNIQVKEVTDNNGVKTIANNLTSTVQVFTDSDYQLPYVLGSAHEGCLPPFPADVFMIPQYGYLTLNDGSQAVGRSSFYCLEYFPSQMLRTGNNFQFSYEFENVPFHSSYAHSQSLDRLMNPLIDQYLYYLSKTINGSGQNQQTLKFSVAGPSNMAVQGRNYIPGPSYRQQRVSTTVTQNNNSEFAWPGASSWALNGRNSLMNPGPAMASHKEGEDRFFPLSGSLIFGKQGTGRDNVDADKVMITNEEEIKTTNPVATESYGQVATNHQSAQAQAQTGWVQNQGILPGMVWQDRDVYLQGPIWAKIPHTDGNFHPSPLMGGFGMKHPPPQILIKNTPVPADPPTAFNKDKLNSFITQYSTGQVSVEIEWELQKENSKRWNPEIQYTSNYYKSNNVEFAVNTEGVYSEPRPIGTRYLTRNL

SEQ ID NO: 1071 - protein, 736 aa, synthetic construct
  source 1..736: note = Description of Artificial Sequence: Synthetic polypeptide
MAADGYLPDWLEDNLSEGIREWWALKPGAPQPKANQQHQDNARGLVLPGYKYLGPGNGLDKGEPVNAADAAALEHDKAYDQQLKAGDNLYLKYNHADAEFQERLKEDTSFGGNLGRAVFQAKKRLLEPLGLVEEAAKTAPGKKRPVEQSPQEPDSSAGIGKSGAQPAKKRLNFGQTGDTESVPDPQPIGEPPAAPSGVGSLTMASGGGAPVADNNEGADGVGSSSGNWHCDSQWLGDRVITTSTRTWALPTYNNHLYKQISNSTSGGSSNDNAYFGYSTPWGYFDFNRFHCHFSPRDWQRLINNNWGFRPKRLNFKLFNIQVKEVTDNNGVKTIANNLTSTVQVFTDSDYQLPYVLGSAHEGCLPPFPADVFMIPQYGYLTLNDGSQAVGRSSFYCLEYFPSQMLRTGNNFQFSYEFENVPFHSSYAHSQSLDRLMNPLIDQYLHYLSKTINGSGQNQQTLKFSVAGPSNMAVQGRNYIPGPSYRQQRVSTTVTQNNNSEFAWPGASSWALNGRNSLMNPGPAMASHKEGEDRFFPLSGSLIFGKQGTGRDNVDADKVMITNEEEIKTTNPVATESYGQVATNHQSAQAQAQTGWVQNQGILPGMVWQDRDVYLQGPIWAKIPHTDGNFHPSPLMGGFGMKHPPPQILIKNTPVPADPPTAFNKDKLNSFITQYSTGQVSVEIEWELQKENSKRWNPEIQYTSNYYKSNNVEFAVNTEGVYSEPRPIGTRYLTRNL

SEQ ID NO: 1072 - protein, 736 aa, synthetic construct
  source 1..736: note = Description of Artificial Sequence: Synthetic polypeptide
MAADGYLPDWLEDNLSEGIREWWALKPGAPQPKANQQHQDNARGLVLPGYKYLGPGNGLDKGEPVNAADAAALEHDKAYDQQLKAGDNPYLKYNHADAEFQERLKEDTSFGGNLGRAVFQAKKRLLEPLGLVEEAAKTAPGKKRPVEQSPQEPDSSAGIGKSGAQPAKKRLNFGQTGDTESVPDPQPIGEPPAAPSGVGSLTMASGGGAPVADNNEGADGVGSSSGNWHCDSQWLGDRVITTSTRTWALPTYNNHLYKQISNSTSGGSSNDNAYFGYSTPWGYFDFNRFHCHFSPRDWQRLINNNWGFRPKRLNFKLFNIQVKEVTDNNGVKTIANNLTSTVQVFTDSDYQLPYVLGSAHEGCLPPFPADVFMIPQYGYLTLNDGSQAVGRSSFYCLEYFPSQMLRTGNNFQFSYEFENVPFHSSYAHSQSLDRLMNPLIDQYLHYLSKTINGSGQNQQTLKFSVAGPSNMAVQGRNYIPGPSYRQQRVSTTVTQNNNSEFAWPGASSWALNGRNSLMNPGPAMASHKEGEDRFFPLSGSLIFGKQGTGRDNVDADKVMITNEEEIKTTNPVATESYGQVATNHQSAQAQAQTGWVQNQGILPGMVWQDRDVYLQGPIWAKIPHTDGNFHPSPLMGGFGMKHPPPQILIKNTPVPADPPTAFNKDKLNSFITQYSTGQVSVEIEWELQKENSKRWNPEIQYTSNYYKSNNVEFAVNTEGVYSEPRPIGTRYLTRNL

SEQ ID NO: 1073 - protein, 736 aa, synthetic construct
  source 1..736: note = Description of Artificial Sequence: Synthetic polypeptide
  VARIANT 442: note = MOD_RES - Any amino acid
MAADGYLPDWLEDNLSEGIREWWALKPGAPQPKANQQHQDNARGLVLPGYKYLGPGNGLDKGEPVNAADAAALEHDKAYDQQLKAGDNPYLKYNHADAEFQERLKEDTSFGGNLGRAVFQAKKRLLEPLGLVEEAAKTAPGKKRPVEQSPQEPDSSAGIGKSGAQPAKKRLNFGQTGDTESVPDPQPIGEPPAAPSGVGSLTMASGGGAPVADNNEGADGVGSSSGNWHCDSQWLGDRVITTSTRTWALPTYNNHLYKQISTSTSGGSSNDNAYFGYSTPWGYFDFNRFHCHFSPRDWQRLINNNWGFRPKRLNFKLFNIQVKEVTDNNGVKTIANNLTSTVQVFTDSDYQLPYVLGSAHEGCLPPFPADVFMIPQYGYLTLNDGSQAVGRSSFYCLEYFPSQMLRTGNNFQFSYEFENVPFHSSYAHSQSLDRLMNPLIDXYLHYLSKTINGSGQNQQTLKFSVAGPSNMAVQGRNYIPGPSYRQQRVSTTVTQNNNSEFAWPGASSWALNGRNSLMNPGPAMASHKEGEDRFFPLSGSLIFGKQGTGRDNVDADKVMITNEEEIKTTNPVATESYGQVATNHQSAQAQAQTGWVQNQGILPDMVWQDRDVYLQGPIWAKIPHTDGNFHPSPLMGGFGMKHPPPQILIKNTPVPADPPTAFNKDKLNSFITQYSTGQVSVEIEWELQKENSKRWNPEIQYTSNYYKSNNVEFAVNTEGVYSEPRPIGTRYLTRNL

SEQ ID NO: 1074 - protein, 736 aa, synthetic construct; identical to SEQ ID NO: 1054
  source 1..736: note = Description of Artificial Sequence: Synthetic polypeptide

SEQ ID NO: 1075 - protein, 736 aa, synthetic construct; identical to SEQ ID NO: 1058
  source 1..736: note = Description of Artificial Sequence: Synthetic polypeptide

SEQ ID NO: 1076 - protein, 736 aa, synthetic construct
  source 1..736: note = Description of Artificial Sequence: Synthetic polypeptide
MAADGYLPDWLEDNLSEGIREWWALKPGAPQPRANQQHQDNARGLVLPGYKYLGPGNGLDKGEPVNAADAAALEHDKAYDQQLKAGDNPYLKYNHADAEFQERLKEDTSFGGNLGRAVFQAKKRLLEPLGLVEEAAKTAPGKKRPVEQSPQEPDSSAGIGKSGAQPAKKRLNFGQTGDTESVPDPQPIGEPPAAPSGVGSLTMASGGGAPVADNNEGADGVGSSSGNWHCDSQWLGDRVITTSTRTWALPTYNNHLYKQISNSTSGGSSNDNAYFGYSTPWGYFDFNRFHCHFSPRDWQRLINNNWGFRPKRLNFKLFNIQVKEVTDNNGVKTIANNLTSTVQVFTDSDCQLPYVLGSAHEGCLPPFPADVFMIPQYGYLTLNDGSQAVGRSSFYCLEYFPSQMLRTGNNFQFSYEFENVPFHSSYAHSQSLDRLTNPLIDQYLYYLSKTINGSGQNQQTLKFSVAGPSNMAVQGRNYIPGPSYRQQRVSTTVTQNNNSEFAWPGASSWALNGRNSLMNPGPAMASHKEGEDRFFPLSGSLIFGKQGTGRDNVDADKVMITNEEEIKTTNPVATESHGQVATNHQSAQAQAQTGWVQNQGILPGMVWQDRDVYLQGPIWAKIPHTDGNFHPSPLMGGFGMKHPPPQILIKNTPVPADPPTAFNKDKLNSFITQYSTGQVSVEIEWELQKENSKRWNPEIQYTSNYYKSNNVEFAVNTEGVYSEPRPIGTRYLTRNL

SEQ ID NO: 1077 - protein, 736 aa, synthetic construct
  source 1..736: note = Description of Artificial Sequence: Synthetic polypeptide
MAADGYLPDWLEDNLSEGIREWWALKPGAPQPKANQQHQDNARGLVLPGYKYLGPGNGLDKGEPVNAADAAALEHDKAYDQQLKAGDNPYLKYNHADAEFQERLKEDTSFGGNLGRAVFQAKKRLLEPLGLVEEAAKTAPGKKRPVEQSPQEPDSSAGIGKSGAQPAKKRLNFGQTGDTESVPDPQPIGEPPAAPSGVGSLTMASGGGAPVADNNEGADGVGSSSGNWHCDSQWLGDRVITTSTRTWALPTYNNHLYKQISNSTSGGSSNDNAYFGYSTPWGYFDFNRFHCHFSPRDWQRLINNNWGFRPKRLNFKLFNIQVKEVTDNNGVKTIANNLTSTVQVFTDSDYQLPYVLGSAHEGCLPPFPADVFMIPQYGYLTLNDGSQAVGRSSFYCLEYFPSQMLRTGNNFQFSYEFENVPFHSSYAHSQSLDRLMNPPIDQYLYYLSKTINGSGQNQQTLKFSVAGPSNMAVQGRNYIPGPSYRQQRVSTTVTQNNNSEFAWPGASSWALNGRNSLMNPGPAMASHKEGEDRFFPLSGSLIFGKQGTGRDNVDADKVMITNEEEIKTTNPVATESYGQVATNHQSAQAQAQTGWVQNQGILPGMVWQDRDVYLQGPIWAKIPHTDGNFHPSPLMGGFGMKHPPPQILIKNTPVPADPPTAFNKDKLNSFITQYSTGQVSVEIEWELQKENSKRWNPEIQYTSNYYKSNNVEFAVNTEGVYGEPRPIGTRYLTRNL

SEQ ID NO: 1078 - protein, 736 aa, synthetic construct
  source 1..736: note = Description of Artificial Sequence: Synthetic polypeptide
MAADGYLPDWLEDNLSEGIREWWALKPGAPQPKANQQHQDNARGLVLPGYKYLGPGNGLDKGEPVNAADAAALEHDKAYDQQLKAGDNPYLKYNHADAEFQERLKEDTSFGGNLGRAVFQAKKRLLEPLGLVEEAAKTAPGKKRPVEQSPQEPDSSAGIGKSGAQPAKKRLNFGQTGDTESVPDPQPIGEPPAAPSGVGSLTMASGGGAPVADNNEGADGVGSSSGNWHCDSQWLGDRVITTSTRTWALPTYNNHLYKQISNSTSGGSSNDNAYFGYSTPWGYFDFNRFHCHFSPRDRQRLINNNWGFRPKRLNFKLFNIQVKEVTDNNGVKTIANNLTSTVQVFTDSDYQLPYVLGSAHEGCLPPFPADVFMIPQYGYLTLNDGSQAVGRSSFYCLEYFPSQMLRTGNNFQFSYEFENVPFHSSYAHSQSLDRLMNPLIDQYLYYLSKTINGSGQNQQTLKFSVAGPSNMAVQGRNYIPGPSYRQQRVSTTVTQNNNSEFAWPGASSWALNGRNSLMNPGPAMASHKEGEDRFFPLSGSLIFGKQGTGRDNVDADKVMITNEEEIKTTNPVATESYGQVATNHQSAQAQAQTGWVQNQGILPGMVWQDRDVYLQGPIWAKIPHTDGNFHPSPLMGGFGMKHPPPQILIKNTPVPADPPTAFNKDKLNSFITQYSTGQVSVEIEWELQKENSKRWNPEIQYTSNYYKSNNVEFAVNTEGVYSEPRPIGTRYLTRNL

SEQ ID NO: 1079 - protein, 736 aa, synthetic construct
  source 1..736: note = Description of Artificial Sequence: Synthetic polypeptide
MAADGYLPDWLEDNLSEGIREWWALKPGAPQPKANQQHQDNARGLVLPGYKYLGPGNGLDKGEPVNAADAAALEHDKAYDQQLKAGDNPYLKYNHADAEFQERLKEDTSFGGNLGRAVFQAKKRLLEPLGLVEEAAKTAPGKKRPVEQSPQEPDSSAGIGKSGAQPAKKRLNFGQTGDTESVPDPQPIGEPPAAPSGVGSLTMASGGGAPVADNNEGADGVGSSSGNWHCNSQWLGDRVITTSTRTWALPTYNNHLYKQISNSTSGGSSNDNAYFGYSTPWGYFDFNRFHCHFSPRDWQRLINNNWGFRPKRLNFKLFNIQVKEVTDNNGVKTIANNLTSTVQVFTDSDYQLPYVLGSAHEGCLPPFPADVFMIPQYGYLTLNDGSQAVGRSSFYCLEYFPSQMLRTGNNFQFSYEFENVPFHSSYAHSQSLDRLMNPLIDQYLYYLSKTINGSGQNQQTLKFSVAGPGNMAVQGRNYIPGPSYRQQRVSTTVTQNNNSEFAWPGASSWALNGRNSLMNPGPAMASHKEGEDRFFPLSGSLIFGKQGTGRDNVDADKVMITNEEEIKTTNPVATESYGQVATNHQSAQAQAQTGWVQNQGILPGMVWQDRDVYLQGPIWAKIPHTDGNFHPSPLMGGFGMKHPPPQILIKNTPVPADPPTAFNKDKLNSFITQYSTGQVSVEIEWELQKENSKRWNPEIQYTSNYYKSNNVEFAVNTEGVYSEPRPIGTRYLTRNL

SEQ ID NO: 1080 - protein, 736 aa, synthetic construct
  source 1..736: note = Description of Artificial Sequence: Synthetic polypeptide
MAADGYLPDWLEDNLSEGIREWWALKPGAPQPKANQQHQDNARGLVLPGYRYLGPGNGLDKGEPVNAADAAALEHDKAYDQQLKAGDNPYLKYNHADAEFQERLKEDTSFGGNLGRAVFQAKKRLLEPLGLVEEAAKTAPGKKRPVEQSPQEPDSSAGIGKSGAQPAKKRLNFGQTGDTESVPDPQPIGEPPAAPSGVGSLTMASGGGAPVADNNEGADGVGSSSGNWHCDSQWLGDRVITTSTRTWALPTYNNHLYKQISNSTSGGSSNDNAYFGYSTPWGYFDFNRFHCHFSPRDWQRLINNNWGFRPKRLNFKLFNIQVKEVTDNNGVKTVANNLTSTVQVFTDSDYQLPYVLGSAHEGCLPPFPADVFMIPQYGYLTLNDGSQAVGRSSFYCLEYFPSQMLRTGNNFQFSYEFENVPFHSSYAHSQSLDRLMNPLIDQYLYYLSKTINGSGQNQQTLKFSVAGPSNMAVQGRNYIPGPSYRQQRVSTTVTQNNNSEFAWPGASSWALNGRNSLMNPGPAMASHKEGEDRFFPLSGSLIFGKQGTGRDNVDADKVMITNEEEIKTTNPVATESYGQVATNHQSAQAQAQTGWVQNQGILPGMVWQDRDVYLQGPIWAKIPHTDGNFHPSPLMGGFGMKHPPPQILIKNTPVPADPPTAFNKDKLNSFITQYSTGQVSVEIEWELQKENSKRWNPEIQYTSNYYKSNNVEFAVNTEGVYSGPRPIGTRYLTRNL

SEQ ID NO: 1081 - protein, 736 aa, synthetic construct; identical to SEQ ID NO: 491
  source 1..736: note = Description of Artificial Sequence: Synthetic polypeptide

SEQ ID NO: 1082 - protein, 736 aa, synthetic construct
  source 1..736: note = Description of Artificial Sequence: Synthetic polypeptide
MAADGYLPDWLEDNLSEGIREWWALKPGAPQPKANQQRQDNARGLVLPGYKYLGPGNGLDKGEPVNAADAAALEHDKAYDQQLKAGGNPCLKYNHADAEFQERLKEDTSFGGNLGRAVFQAKKRLLEPLGLVEEAAKTAPGKKRPVEQSPQEPDSSAGIGRSGAQPAKKRLNFGQTGDTESVPDPQPIGEPPAAPSGVGSLTMASGGGAPVADNNEGADGVGSSSGNWHCDSQWLGDRVITTSTRTWALPTYNNHLYKQISNSTSGGSSNDNAYFGYSTPWGYFDFNRFHCHFSPRDWQRLINNNWGFRPKRLNFKLFNIQVKEVTDNNGVKAIANNLTSTVQVFTDSDYQLPYVLGSAHEGCLPPFPADVFMIPQYGYLTLNDGSQAVGRSSFYCLEYFPSQMLRTGNNFQFSYEFENVPFHSSYAHSQSLDRLMNPLIDQYLYYLSKTIDGSGQNQQTLKFSVAGPSNMAVQGRNYIPGPSYRQQRVSTTVTQNNNSEFAWPGASSWALNGRNSLMDPGPAMASHKEGEDRFFPLSGSLIFGKQGTGRDNVDADKVMITNEEEIKTTNPVATESYGQVATNHQSAQAQAQTGWVQNQGILPGMVWQDRDVYLQGPIWAKIPHTGGNFHPSPLMGGFGMKHPPPQILIKNTPVPADPPTAFNKDKLNSFITQYSTGQVSVEIEWELQKENSKRWNPEIQYTSNYYKSNNVEFAVNTEGVYSEPRPIGTRYLTRNL

SEQ ID NO: 1083 - protein, 736 aa, synthetic construct
  source 1..736: note = Description of Artificial Sequence: Synthetic polypeptide
MAADGYLPDWLEDNLSEGIREWWALKPGAPQPKANQQHQDNARGLVLPGYKYLGPGNGLDKGEPVNAADAAALEHDKAYDQQLKAGDNPYLKYNHADAEFQERLKEDTSFGGNLGRAVFQAKKRLLEPLGLVEEAAKTAPGKKRPVEQSPQEPDSSAGIGKSGAQPAKKRLNFGQTGDTESVPDPQPIGEPPAAPSGVGSLTMASGGGAPVADNNEGADGVGSSSGNWHCDSQWLGDRVITTSTRTWALPTYNNHLYKQISNSTSGGSSNDNAYFGYSTPWGYFDFNRFHCHFSPRDWQRLINNNWGFRPKRLNFKLFNIQVKEVTDNNGVKTIANNLTSTVQVFTDSDYQLPYVLGSAHEGCLPPFPADVFMIPQYGYLTLNDGSQAVGRSSFYCLEYFPSQMLRTGNNFQFSYEFENVPFHSSYAHSQSLDRLMNPLIDQYLYYLSKTINGSGQNQQTLKFSVAGPSNMAVQGRNYIPGPSYRQQRVSTTVTQNNNSEFAWPGASSWALNGRNSLMNPGPAMASHKEGEDRFFPLSGSLIFGKQGTGRDNVDADKVMITNEEEIKTTNPVATESYGQVATNHQSAQAQAQTGWVQNQGILPGMVWQDRDVYLQGPIWAKIPHTDGNFHPSPLMGGFGMKHPPPQILIKNTPVPADPPTAFNKDKLNSFITQYSTGQVSVEIEWELQKENSKRWNPEIQYTSNYYKPNNVEFAVNTEGVYSEPRPIGTRYLTRNL

SEQ ID NO: 1084 - protein, 736 aa, synthetic construct
  source 1..736: note = Description of Artificial Sequence: Synthetic polypeptide
MAADGYLPDWLEDNLSEGIREWWALKPGAPQPKANQQHQDNARGLVLPGYKYLGPGNGLDKGEPVNAADAAALEHNKAYDQQLKAGDNPYLKCNHADAEFQERLKEDTSFGGNLGRAVFQAKKRPLEPLGLVEEAAKTAPGKKRPVEQSPQEPDSSAGIGKSGAQPAKKRLNFGQTGDTESVPDPQPIGEPPAAPSGVRSLTMASGGGAPVADNNEGADGVGSSSGNWHCDSQWLGDRVITTSTRTWALPTYNNHLYKQISNSTSGGSSNDNAYLGYSTPWGYFDFNRFHCHFSPRDWQRLINNNWGFRPKRLNFKLFNIQVKEVTDNNGVKTIANNLTSTVQVFTDSDYQLPYVLGSAHEGCLPPFPADVFMIPQYGYLTLNDGSQAVGRSSFYCLEYFPSQMLRTGNNFQFSYEFENVPFHSSYAHSQSLDRLMNPLIDQYLYYLSKTINGSGQNQQTLKFSVAGPSNMAVQGRNYIPGPSYRQQRVSTTVTQNNNSEFAWPGASSWALNGRNSLMNPGPTMASHKEGEDRFFPLSGSLIFGKQGTGRDNVDADKVMITNEEEIKTTNPVATESYGQVATNHQSAQAQAQTGWVQNQGILPGMVWQDRDVYLQGPIWAKIPHTDGNFHPSPLMGGFGMKHPPPQILIKNTPVPADPPTAFNKDKLNSFITQYSTGQVSVEIEWELQKENSKRWNPEIQYTSNYYKSNNVEFAVNTEGVYSEPRPIGTRYLTRNL

SEQ ID NO: 1085 - protein, 736 aa, synthetic construct
  source 1..736: note = Description of Artificial Sequence: Synthetic polypeptide
MAADGYLPDWLEDNLSEGIREWWALKPGAPQPKANQQHQDNARGLVLPGYKYLGPGNGLDKGEPVNAADAAALVHDKAYDQQLKAGDNPYLKCNHADAEFQERLKEDTSFGGNLGRAVFQAKKRLLEPLGLVEEAAKTAPGKKRPVEQSPQEPDSSAGIGKSGAQPAKKRLNFGQTGDTESVPDPQPIGEPPAAPSGVGSLTMASGGGAPVADNNEGADGVGSSSGNWHCDSQWLGDRVITTSTRTWALPTYNNHLYKQISNSTSGGSSNDNAYLGYSTPWGYFDFNRFHCHFSPRDWQRLINNNWGFRPKRLNFKLFNIQVKEVTDNNGVKTIANNLTSTVQVFTDSDYQLPYVLGSAHEGCLPPFPADVFTIPQYGYLTLNDGSQAVGRSSFYCLEYFPSQMLRTGNNFQFSYEFENVPFHSSYAHSQSLDRLMNPLIDQYLYYLSKTINGSGQNQQTLKFSVAGPSNMAVQGRNYIPGPSYRQQRVSTTVTQNNNSEFAWPGASSWALNGRNSLMNPGPAMASHKEGEDRFFPLSGSLIFGKQGTGRDNVDADKVMITNEEEIKTTNPVATESYGQVATNHQSAQAQAQTGWVQNQGILPGMVWQDRDVYLQGPIWAKIPHTDGNFHPSPLMGGFGMKHPPPQILIKNTPVPADPPTAFNKDKLNSFITQYSTGQVSVEIEWELQKENSKRWNPEIQYTSNYYKSNNVEFAVNTEGVYSEPRPIGPRYLTRNF

SEQ ID NO: 1086 - protein, 736 aa, synthetic construct
  source 1..736: note = Description of Artificial Sequence: Synthetic polypeptide
MAADGYLPDWLEDNLSEGIREWWALKPGAPQPKANQQHQDNARGLVLPGYKYLGPGNGLDKGEPVNAADAAALEHNKAYDQQLKAGDNPYLKCNHADAEFQERLKEDTSFGGNLGRAVFQAKKRLLEPLGLVEEAAKTAPGKKRPVEQSPQEPDSSAGIGKSGAQPAKKRLNFGQTGDTESVPDPQPIGEPPAAPSGVRSLTMASGGGAPVADNNEGADGVGSSSGNWHCDSQWLGDRVITTSTRTWALPTYNNHLYKQISNSTSGGSSNDNAYLGYSTPWGYFDFNRFHCHFSPRDWQRLINNNWGFRPKRLNFKLFNIQVKEVTDNNGVKTIANNLTSTVQVFTDSDYQLPYVLGSAHEGCLPPFPADVFMIPQYGYLTLNDGSQAVGRSSFYCLEYFPSQMLRTGNNFQFSYEFENVPFHSSYAHSQSLDRLMNPLIDQYLYYLSKTINGSGQNQQTLKFSVAGPSNMAVQGRNYIPGPSYRQQRVSTTVTQNNNSEFAWPGASSWALNGRNSLMNPGPAMASHKEGEDRFFPLSGSLIFGKQGTGRDNVDADKVMITNEEEIKTTNPVATESYGQVATNHQSAQAQAQTGWVQNQGILPGMVWQDRDVYLQGPIWAKIPHTDGNFHPSPLMGGFGMKHPPPQILIKNTPVPADPPTAFNKDKLNSFITQYSTGQVSVEIEWELQKENSKRWNPEIQYTSNYYKSNNVEFAVNTEGVYSEPRPIGTRYLTRNL

SEQ ID NO: 1087 - protein, 736 aa, synthetic construct
  source 1..736: note = Description of Artificial Sequence: Synthetic polypeptide
MAADGYLPDWLEDNLSEGIREWWALKPGAPQPKANQQHQDNARGLVLPGYKYLGPGNGLDKGEPVNAADAAALEHDKAYDQQLKAGDNPYLKCNHADAEFQERLKEDTSFGGNLGRAVFQAKKRLLEPLGLVEEAAKTAPGKKRPVEQSPQEPDSSAGIGKSGAQPAKKRLNFGQTGDTESVPDPQPIGEPPAAPSGVGSLTMASGGGAPVADNNEGADGVGSSSGNWHCDSQWLGDRVITTSTRTWALPTYNNHLYKQISNSTSGGSSNDNAYLGYSTPWGYFDFNRFHCHFSPRDWQRLINNNWGFRPKRLNFELFNIQVKEVTDNNGVKTIANNLTSTVQVFTDSDYQLPYVLGSAHEGCLPPFPADVFMIPQYGYLTLNDGSQAVGRSSFYCLEYFPSQMLRTGNNFQSSYEFENVPFHSSYAHSQSLDRLMNPLIDQYLYYLSKTINGSGQNQQTLKFSVAGPSNMAVQGRNYIPGPSYRQQRASTTVTQNNNSEFAWPGASSWALNGRNSLMNPGPAMASHKEGEDRFFPLSGSLIFGKQGTGRDNVDADKVMITNEEEIKTTNPVATESYGQVATNHQSAQAQAQTGWVQNQGILPGMVWQDRDVYLQGPIWAKIPHTDGNFHPSPLMGGFGMKHPPPQILIKNTPVPADPPTAFNKDKLNSFITQYSTGQVSVEIEWELQKENSKRWNPEIQYTSNYYKSNNVEFAVNTEGVYSEPRPIGTRYLTRNL

SEQ ID NO: 1088 - protein, 736 aa, synthetic construct
  source 1..736: note = Description of Artificial Sequence: Synthetic polypeptide
MAADGYLPDWLEDNLSEGIREWWALKPGAPQPKANQQHQDNARGLVLPGYKYLGPGNGLDKGEPVNAADAAALEHDKAYDQQLKAGDNPYLKCNHADAEFQERLKEDTSFGGNLGRAVFQAKKRLLEPLGLVEEAAKTAPGKKRPVEQSPQEPDSSAGIGKSGAQPAKKRLNFGQTGDTESVPDPQPIGEPPAAPPGVGSLTMASGGGAPVADNNEGADGVGSSSGNWHCDSQWLGDRVITTSTRTWALPTYNNHLYKQISNSTSGGSSNDNAYLGYSTPWGYFDFNRFHCHFSPRDWQRLINNNWGFRPKRLNFKLFNIQVKEVTDNNGVKTIANNLTSTVQVFTDSDYQLPYVLGSAHEGCLPPFPADVFMIPQYGYLTLNDGSQAVGRSSFYCLEYFPSQMLRTGNNFQFSYEFENVPFHSSYAHSQSLDRLMNPLIDQYLYYLSKTISGSGQNQQTLKFSVAGPSNMAVQGRNYIPGPSYRQQRVSTTVTQNNSSEFAWPGASSWALNGRNSLMNPGPAMASHKEGEDRFFPLSGSLIFGKQGTGRDNVDADKVMITNEEEIKTTNPVATESYGQVATNHQSAQAQAQTGWVQNQGILSGMVWQDRDVYLQGPIWAKIPHTDGNFHPSPLMGGFGMKHPPPQILIKNTPVPADPPTAFNKDKLNSFITQYSTGQVSVEIEWELQKENSKRWNPEIQYTSNYYKSNNVEFAVNTEGVYSEPRPIGTRYLTRNL

SEQ ID NO: 1089 - protein, 736 aa, synthetic construct
  source 1..736: note = Description of Artificial Sequence: Synthetic polypeptide
MAADGYLPDWLEDNLSEGIREWWALKPGAPQPKANQQHQDNARGLVLPGYKYLGPGNGLDKGEPVNAADAAALEHDKAYDQQLKAGDNPYLKCNHADAEFQERLKEDTSFGGNLGRAVFQAKKRLLEPLGLVEEAAKTAPGKKRPVEQSPQEPDSSAGIGKSGAQPAKKRLNFGQTGDTESVPDPQPIGEPPAAPSGVGSLTMASGGGAPVADNNEGADGVGSSSGNWHCDSQWLGDRVITTSTRTWALPTYNNHLYKQISNSTSGGSSNDNAYLGYSTPWGYFDFNRFHCHFSPRDWQRLINNNWGFRPKRLNFKLFNIQVKEVTDNNGVKTIANNLTSTVQVFTDSDYQLPYVLGSAHEGCLPPFPADVFMIPQYGYLTLNDGSQAVGRSSFYCLEYFPSQMLRTGNNFQFSYEFENVPFHSSYAHSQSLDRLMNPLIDQYLYYLSKTINGSGQNQQTLKFSVAGPSNMAVQGRNYIPGPSYRQQRVSTTVTQNNNSEFAWPGASSWALNGRNSLMNPGPAMASHKEGEDRFFPLSGSLIFGKQGTGRDNVDADKVMITNEEEIKTTNPVATESYGQVATNHQSAQAQAQTGWVQNQGILPGMVWQDRDVYLQGPIWAKIPHTDGNFHPSPLMGGFGMKHPPPQILIKNTPVPADPPTAFNKDKLNSFITQYSTGQVSVEIEWELQKENSKRWNPEIQYTSNYYKSNNVEFAVNTEGVYSEPRPIGTRYLTRNL

SEQ ID NO: 1090 - protein, 736 aa, synthetic construct; identical to SEQ ID NO: 1089
  source 1..736: note = Description of Artificial Sequence: Synthetic polypeptide

SEQ ID NO: 1091 - protein, 736 aa, synthetic construct
  source 1..736: note = Description of Artificial Sequence: Synthetic polypeptide
MAADGYLPDWLEDNLSEGIREWWALKPGAPQPKANQQHQDNARGLVLPGYKYLGPGNGLDKGEPVNAADAAALEHDKAYDQQLKAGDNPYLKCNHADAEFQERLKEDTSFGGNLGRAVFQAKKRLLEPLGLVEEAAKTAPGKKRPVEQSPQEPDSSAGIGKSGAQPAKKRLNFGQTGDTESVPDPQPIGEPPAAPSGVGSLTMASGGGAPVADNNEGADGVGSSSGNWHCDSQWLGDRVITTSTRTWALPTYNNHLYKQISNSTSGGSSNDNAYLDYSTPWGYFDFNRFHCHFSPRDWQRLINNNWGFRPKRLNFKLFNIQVKEVTDNNGVKTIANNLTSTVQVFTDSDYQLPYVLGSAHEGCLPPFPADVFMIPQYGYLTLNDGSQAVGRSSFYCLEYFPSQMLRTGNNFQFSYEFENVPFHSSYAHSQSLDRLMNPLIDQYLYYLSKTINGSGQNQQTLKFSVAGPSNMAVQGRNYIPGPSYRQQRVSTTVTQNNNSEFAWPGASSWALNGRNSLMNPGPAMASHKEGEDRFFPLSGSLIFGKQGTGRDNVDADKVMITNEEEIKTTNPVATESYGQVATNHQSAQAQAQTGWVQNQGILPGMVWQGRDVYLQGPIWAKIPHTDGNFHPSPLMGGFGMKHPPPQILIKNTPVPADPPTAFNKDKLNSFITQYSTGQVSVEIEWELQKENSKRWNPEIQYTSNYYKSNNVEFAVNTEGVYSEPRPIGTRYLTRNL

SEQ ID NO: 1092 - protein, 736 aa, synthetic construct; identical to SEQ ID NO: 1089
  source 1..736: note = Description of Artificial Sequence: Synthetic polypeptide

SEQ ID NO: 1093 - protein, 736 aa, synthetic construct
  source 1..736: note = Description of Artificial Sequence: Synthetic polypeptide
MAADGYPPDWLEDNLSEGIREWWALKPGAPQPKANQQHQDNARGLVLPGYKYLGPGNGLDKGEPVNAADAAALEHDKAYDQQLKAGDNPHLKYNHADAEFQERLKEDTSFGGNLGRAVFQAKKRLLEPLGLVEEAAKTAPGKKRPVEQSPQEPDSSAGIGKSGAQPAKKRLNFGQTGDTESVPDPQPIGEPPAAPSGVGSLTMASGGGAPVADNNEGADGVGSSSGNWHCDSQWLGDRVITTSTRTWALPTYNNHLYKQISNSTSGGSSNDNAYFGYSTPWGYFDFNRFHCHFSPRDWQRLINNNWGFRPKRLNFKLFNIQVKEVTDNNGVKTIANNLTSTVQVFTDSDYQLPYVLGSAHEGCLPPFPADVFMIPQYGYLTLNDGSQAVGRSSFYCLEYFPSQMLRTGNNFQFSYEFENVPFHSSYAHSQSLDRLMNPLIDQYLYYLSKTINGSGQNQQTLKFSVAGPSNMAVQGRNYIPGPSYRQQRVSTTVTQNNNSEFAWPGASSWALNGRNSLMNPGPAMASHKEGEDRFFPLSGSLIFGKQGTGRDNVDADKVMITNEEEIKTTNPVATESYGQVATNHQSAQAQAQTGWVQNQGILPGMVWQDRDVYLQGPIWAKIPHTDGNFHPSPLMGGFGVKHPPPQILIKNTPVPADPPTAFNKDRLNSFITQYSTGQVSVEIEWELQKENSKRWNPEIQYTSNYYKSNNVEFAVNTEGVYSEPRPIGTRYLTRNL

SEQ ID NO: 1094 - protein, 736 aa, synthetic construct
  source 1..736: note = Description of Artificial Sequence: Synthetic polypeptide
MAADGYLPDWLEDNLSEGIREWWALKPGAPQPKANQQHQDNARGLVLPGYKYLGPGNGLDKGEPVNAADAAALEHDKAYDQQLKAGDNPYLKYNHADAEFQERLKEDTSFGGNLGRAVFQAKKRLLEPLGLVEEAAKTAPGKKRPVEQSPQEPDSSAGIGKSGAQPAKKRLNFGQTGDTESVPDPQPIGEPPAAPSGVGSLTMASGGGAPVADNNEGADGVGSSSGNWHCDSQWLGDRVITTSTRTWALPTYNNHLYKQISNSTSGGSSNDNAYFGYSTPWGYFDFNRFHCHFSPRDWQRLINNNWGFRPKRLNFKLFNIQVKEVTDNNGVKTIANNLTSTVQVFTDSDYQLPYVLGSAHEGCLPPFPADVFMIPQYGYLTLNDGSQAVGRSSFYCLEYFPSQMLRTGNNFQFSYEFENVPFHSSYAHSQSLDRLMNPLIDQYLYYLSKTINGSGQNQQTLKFSVAGPSNMAVQGRNYIPGPSYRQQRVSTTVTQNNNSEFAWPGASSWALNGRNSLMNPGPAMASHKEGEDRFFPLSGSLIFGKQGTGRDNVDADKVMITNEEEIKTTNPVATESYGQVATNHQSAQAQAQTGWVQNQGILPGMVWQDRDVYLQGPIWAKIPHTDGNFHPSPLMGGFGVKHPPPQILIKNTPVPADPPTAFNKDKLNSFITQYSTGQVSVEIEWELQKENSKRWNPEIQYTSNYYKSNNVEFAVNTEGVYSEPRPIGTRYLTRNL

SEQ ID NO: 1095 - protein, 736 aa, synthetic construct
  source 1..736: note = Description of Artificial Sequence: Synthetic polypeptide
MAADGYLPDWLEDNLSEGIREWWALKPGAPQPKANQQHQDNARGLVLPGYKYLGPGNGLDKGEPVNAADAAALEHDKAYDQQLKAGDNPYLKYNHADAEFQERLKEDTSFGGNLGRAVFQAKKRLLEPLGLVEEAAKTAPGKKRPVEQSPQEPDSSAGIGKSGAQPAKKRLNFGQTGDTESVPDPQPIGEPPAAPSGVGSLTMASGGGAPVADNNEGADGVGSSSGNWHCDSQWLGDRVITTSTRTWALPTYNNHLYKQISNSTSGGSSNDNAYFGYSTPWGYFDFNRFHCHFSPRDWQRLTNNNWGFRPKRLNFKLFNIQVKEVTDNNGVKTIANNLTSTVQVFTDSDYQLPYVLGSAHEGCLPPFPADVFMIPQYGYLTLNDGSQAVGRSSFYCLEYIPSQMLRTGNNFQFSYEFENVPFHSSYAHSQSLDRLMNPLIDQYLYYLSKTINGSGQNQQTLKFSVAGPSNMAVQGRNYIPGPSYRQQRVSTTVTQNNNSEFAWPGASSWALNGRNSLMNPGPAMASHKEGEDRFFPLSGSLIFGKQGTGRDNVDADKVMITNEEEIKTTNPVATESYGQVATNHQSAQAQAQTGWVQNQGILPGMVWQDRDVYLQGPIWAKIPHTDGNFHPSPLMGGFGVKHPPPQILIKNTPVPADPPTAFNKDKLNSFITQYSTGQVSVEIEWELQKENSKRWNPEIQYTSNYYKSNNVEFAVNTEGVYSEPRPIGTRYLTRNL

SEQ ID NO: 1096 - protein, 736 aa, synthetic construct
  source 1..736: note = Description of Artificial Sequence: Synthetic polypeptide
MAADGYLPDWLEDNLSEGIREWWALKPGAPQPKANQQHQDNARGLVLPGYKYLGPGNGLDKGEPVNAADAAALEHDKAYDQQLKAGDNPYLKYNHADAEFQERLKEDTSFGGNLGRAVFQAKKRLLEPLGLVEEAAKTAPGKKRPVEQSPQEPDSSAGIGKSGAQPAKKRLNFGQTGDTESVPDPQPIGEPPAAPSGVGSLTMASGGGAPVADNNEGADGVGSSSGNWHCDSQWLGDRVITTSTRTWALPTYNNHLYKQISNSTSGGSSNDNAYFGYSTPWGYFDFNRFHCHFSPRDWQRLINNNWGFRPKRLNFKLFNIQVKEVTDNNGVKTIANNLTSTVQVFTDSDYQLPYVLGSAHEGCLPPFPADVFMIPQYGYLTLNDGSQAVGRSSFYCLEYFPSQMLRTGNNFQFSYEFENVPFHSSYAHSQSLDRLMNPLIDQYLYYLSKTINGSGQNQQTLKFSVAGPSNMAVQGRNYIPGPSYRQQRVSTTVTQNNNSEFAWPGASSWALNGRNSLMNPGPAMASHKEGEDRFFPLSGSLISGKQGTGRDNVDANKVMITNEEEIKTTNPVATESYGQVATNHQSAQAQAQTGWVQNQGILPGMVWQDRDVYLQGPIWAKIPHTDGNFHPSPLMGGFEMKHPPPQILIKNTPVPADPPTAFNKDKLNSFITQYSTGQVSVEIEWELQKENSKRWNPEIQYTSNYYKSNNVEFAVNTEGVYSEPRPIGTRYLTRNL

SEQ ID NO: 1097 - protein, 736 aa, synthetic construct
  source 1..736: note = Description of Artificial Sequence: Synthetic polypeptide
MAADGYLPDWLEDNLSEGIREWWALKPGAPQPKANQQHQDNARGLVLPGYKYLGPGNGLDKGEPVNAADAAALEHDKAYDQQLKAGDNPYLKYNHADAEFQERLKEDTSFGGNLGRAVFQAKKRLLEPLGLVEEAAKTAPGKKRPVEQSPQEPDSSAGIGKSGAQPAKKRLNFGQTGDTESVPDPQPIGEPPAAPSGVGSLTIASGGGAPVADNNEGADGVGSSSGNWHCDSQWLGDRVITTSTRTWALPTYNNHLYKRISNSTSGGSSNDNAYFGYSTPWGYFDFNRFHCHFSPRDWQRLINNNWGFRPKRLNFKLFNIRVKEVTDNNGVKTITNNLTSTVQVFTDSDYQLPYVLGSAHEGCLPPFPADVFMIPQYGYLTLNDGSQAVGRSSFYCLEYFPSQMLRTGNNFQFSYEFENVPFHSSYAHSQSLDRLMNPLIDQYLYYLSKTINGSGQNQQTLKFSVAGPSNMAVQGRNYIPGPSYRQQRVSTTVTRNNNSEFAWPGASSWALNGRNSLMNPGPAMASHKEGEDRFFPLSGSLIFGKQGTGRDNVDADKVMITNEEEIKTTNPVATESYGQVATNHQSAQAQAQTGWVQNQGILPGMVWQDRDVYLQGPIWAKIPHTDGNFHPSPLMGGFGVKHPPPQILIKNTPVPADPPTAFNKDKLNSFITQYSTGQVSVEIEWELQKENSKRWNPEIQYTSNYYKSNNVEFAVNTEGVYSEPRPIGTRYLTRNL

SEQ ID NO: 1098 - protein, 736 aa, synthetic construct
  source 1..736: note = Description of Artificial Sequence: Synthetic polypeptide
MAADGYLPDWLEDNLSEGIREWWALKPGAPQPKANQQHQDNARGLVLPGYKYLGPGNGLDKGEPVNAADAAALEHDKAYDQQLKAGDNPYLKYNHADAEFQERLKEDTSFGGNLGRAVFQAKKRLLEPLGLVEEAAKTAPGKKRPVEQSPQEPDSSAGIGKSGAQPAKKRLNFGQTGDTEPVPDPQPIGEPPAAPSGVGSLTMASGGGAPVADNNEGADGVGSSSGNWHCDSQWLGDRVITTSTRTWALPTYNNHLYKQISNSTSGGSSNDNAYFGYSTPWGYFDFNRFHCHFSPRDWQRLINNNWGFRPKRLNFKLFNIQVKEVTDNNGVKTIANNLTSTVQVFTDSDYQLPYVLGSAHEGCLPPFPAGVFMIPQYGYLTLNDGSQAVGRSSFYCLEYFPSQMLRTGNNFQFSYEFENVPFHSSYAHSQSLDRLMNPLIDQYLYYLSKTINGSGQNQQTLKFSVAGPSNMAVQGRNYIPGPSYRQQRVSTTATQNNNSEFAWPGASSWALNGRNSLMNPGPAMASHKEGEDRFFPLSGSLIFGKQGTGRDNVDADKVMITNEEEIKTTNPVATESYGQVATNHQSAQAQAQTGWVQNQGILPGMVWQDRDVYLQGPIWAKIPHTDGNFHPSPLMGGFGMKHPPPQILIKNTPVPADPPTAFNKDKLNSFITQYSTGQVSVEIEWELQKENSKRWNPEIQYTSNYYKSNNVEFAVNTEGVYSEPRPIGTRYLTRNL

SEQ ID NO: 1099 - protein, 736 aa, synthetic construct
  source 1..736: note = Description of Artificial Sequence: Synthetic polypeptide
MAADGYLPDWLEDNLSEGIREWWALKPGAPQPKANQQHQDNARGLVLPGYKYLGPGNGLDKGEPVNAADAAALEHDKAYDQQLKAGDNPYLKYNHADAGFQERLKEDTSFGGNLGRAVFQAKKRLLEPLGLVEEAAKTAPGKKRPVEQSPQEPDSSAGIGKSGAQPAKKRLNFGQTGDTESVPVPQPIGEPPAAPSGVGSLTMASGGGAPVADNNEGADGVGSSSGNWHCDSQWLGDRVITTSTRTWALPTYNNHLYKQISNSTSGGSSNDNAYFGYSTPWGYFDFNRFHCHFSPRDWQRLINNNWGFRPKRLNFKLFNIQVKEVTDNNGVKTIANNLTSTVQVFTDSDYQLPYVLGSAHEGCLPPFPADVFMIPQYGYLTLNDGSQAVGRSSFYCLEYFPSQMLRTGNNFQFSYEFENVPFHSSYAHSQSLDRLMNPLIDQYLYYLSKTINGSGQNQQTLKFSVAGPSNMAVQGRNYIPGPSYRQQRVSTTVTQNNNSEFAWPGASSWALNGRNSLMNPGPAMASHKEGEDRFFPLSGSLIFGKQGAGRDNVDADKVMITNEEEIKTTNPVATESYGQVATNHQSAQAQAQTGWVQNQGILPGMVWQDRDVYLQGPIWAKIPHTDGNFHPSPLMGGFGMKHPPPQILIKNTPVPADPPTAFNKDKLNSFITQYSTGQVSVEIEWELQKENSKRWNPEIQYTSNYYKSNNVEFAVNTEGVYSEPRPIGTRYLTRNL

SEQ ID NO: 1100 - protein, 736 aa, synthetic construct
  source 1..736: note = Description of Artificial Sequence: Synthetic polypeptide
  VARIANT 126: note = MOD_RES - Any amino acid
MAADGYLPDWLEDNLSEGIRERWALKPGAPQPKANQQHQDNARGLVLPGYKYLGPGNGLDKGEPVNAADAAALEHDKAYDQQLKAGDNPYLKYNHADAEFQERLKEDTSFGGNLGRAVFQAKKRLXEPLGLVEEAAKTAPGKKRPVEQSPQEPDSSAGIGKSGAQPAKKRLNFGQTGDTESVPDPQPIGEPPAAPSGVGSLTMASGGGAPVADNNEGADGVGSSSGNWHCDSQWLGDRVITTSTRTWALPTYNNHLYKQISNSTSGGSSNDNAYFGYSTPWGYFDFNRFHCHFSPRDWQRLINNNWGFRPKRLNFKLFNIQVKEVTDNNGVKTIANNLTSTVQVFTDSDYQLPYVLGSAHEGCLPPFPADVFMIPQYGYLTLNDGSQAVGRSSFYCLEYFPSQMLRTGNNFQFSYEFENVPFHSSYAHSQSPDRLMNPLIDQYLYYLSKTINGSGQNQQTLKFSVAGPSNMAVQGRNYIPGPSYRQQRVSTTVTQNNNSEFAWPGASSWALNGRNSLMNPGPAMASHKEGEDRFFPLSGSLIFGKQGTGRDNVDADKVMITNEEEIKTTNPVATESYGQVATNHQSAQAQAQTGWVQNQGILPGMVWQDRDVYLQGPIWAKIPHTDGNFHPSPLMGGFGVKHPPPQILIKNTPVPADPPTAFNKDKLNSFITQYSTGQVSVEIEWELQKENSKRWNPEIQYTSNYYKSNNVEFAVNTEGVYSEPRPIGTRYLTRNL

SEQ ID NO: 1101 - protein, 736 aa, synthetic construct
  source 1..736: note = Description of Artificial Sequence: Synthetic polypeptide
MAADGYLPDWLEDNLSEGIREWWALKPGAPQPKANQQHQDNARGLVLPGYKYLGPGNGLDKGEPVNAADAAALEHDKAYDQQLKAGDNPYLKYNHADAEFQERLKEDTSFGGNLGRAVFQAKKRLLEPLGLVEEAAKTAPGKKRPVEQSPQEPDSSAGIGKSGAQPAKKRLNFGQTGDTESVPDPQPIGEPPAAPSGVGSLTMASGGGAPVADNNEGADGVGSSSGNWHCDSQWLGDRVITTSTRTWALPTYNNHLYKQISNSTSGGSSNDNAYLGYSTPWGYFDFNRFHCHFSPRDWQRLINNNWGFRPKRLNFKLFNIQVKEVTDNNGVKTIANNLTSTVQVFTDSDYQLPYVLGSAHEGCLPPFPADVFMIPQYGYLTLNDGSQAVGRSSFYCLEYFPSQMLRTGNNFQFSYEFENVPFHSSYAHSQSLDRLMNPLIDQYLYYLSKTINGSGQNQQTLKFSVAGPSNMAVQGRNYIPGPSYRQQRVSTTVTQNNNSEFAWPGASSWALNGRNSLMNPGPAMASHKEGEDRFFPLSGSLIFGKQGTGRDNVDADKVMITNEEEIKTTNPVATESYGQVATNHQSAQAQAQTGWVQNQGILPGMVWQDRDVYLQGPIWAKIPHTDGNFHPSPLMGGFGMKHPPPQILIKNTPVPADPPTAFNKDKLNSFITQYSTGQVSVEIEWELQKENSKRWNPEIQYTSNYYKSNNVEFAVNTEGVYSEPRPIGTRYLTRNL

SEQ ID NO: 1102 - protein, 736 aa, synthetic construct
  source 1..736: note = Description of Artificial Sequence: Synthetic polypeptide
MAADGYLPDWLEDNLSEGIREWWALKPGAPQPKANQQHQDNARGLVLPGYKYLGPGNGLDKGEPVNAADAAALEHDKAYDQQLKAGDNPYLKYNHADAEFQERLKEDTSFGGNLGRAVFQAKKRLLEPLGLVEEAAKTAPGKKRPVEQSPQEPDSSAGIGKSGAQPAKKRLNFGQTGDTESVPDPQPIGEPPAAPSGVGSLTMASGGGAPVADNNEGADGVGSSSGNWHCDSQWLGDRVITTSTRTWALPTYNNHLYKQISNSTSGGSSNDNAYFGYSTPWGYFDFNRFHCHFSPRDWQRLINNNWGFRPKRLNFKLFNIQVKEVTDNNGVKTIANNLTSTVQVFTDSDYQLPYVLGSAHEGCLPPFPADVFMIPQYGYLTLNDGSQAVGRSSFYCLEYFPSQMLRTGNNFQFSYEFENVPFHSSYAHSQSLDRLMNPLIDQYLYYLSKTINGSGQNQQTLKFSVAGPSNMAVQGRNYIPGPSYRQQRVSTTVTQNNNSEFAWPGASSWALNGRNSLMNPGPAMASHKEGEDRFFPLSGSLIFGKQGTGRDNVDADKVMITNEEEIKTTNPVATESYGQVATNHQSAQAQAQTGWVQNQGILPGMVWQDRDVYLQGPIWAKIPHTDGNFHPSPLMGGFGMKHPPPQILIKNTPVPADPPTAFNKDKLDSFITQYSTGQVSVEIEWELQKENSKRWNPVIQYTSNYYKSNNVEFAVNTEGVYSEPRPIGTRYLTRNL

SEQ ID NO: 1103 - protein, 736 aa, synthetic construct
  source 1..736: note = Description of Artificial Sequence: Synthetic polypeptide
MAADGYLPDWLEDNLSEGIREWWDLKPGAPKPKANQQKQDDGRGLVLPGYKYLGPFNGLDKGEPVNAADAAALEHDKAYDQQLKAGDNPYLRYNHADAEFQERLQEDTSFGGNLGRAVFQAKKRVLEPLGLVEEGAKTAPGKKRPVEQSPQEPDSSSGIGKTGQQPAKKRLNFGQTGDSESVPDPQPLGEPPATPAAVGPTTMASGGGAPMADNNEGVDGVGNASGNWHCDSTWLGDRVITTSTRTWALPTYNNHLYKQISSASTGASNDNHYFGYSTPWGYFDFNRFHCHFSPRDWQRLINNNWGFRPKRLNFKLFNIQVKEVTTNDGVTTIANNLTSTVQVFSDSEYQLPYVLGSAHQGCLPPFPADVFMIPQYGYLTLNNGSQAVGRSSFYCLEYFPSQMLRTGNNFTFSYTFEEVPFHSSYAHSQSLDRLMNPLIDQYLYYLNRTQNQSGSAQNKDLLFSRGSPAGMSVQPKNWLPGPCYRQQRVSKTKTDNNNSNFTWTGASKYNLNGRESIINPGTAMASHKDDEDKFFPMSGVMIFGKESAGASNTALDNVMITDEEEIKATNPVATERFGTVAVNFQSSSTDPATGDVHAMGALPGMVWQDRDVYLQGPIWAKIPHTDGHFHPSPLMGGFGLKNPPPQILIKNTPVPANPPAEFSATKLASFITQYSTGQVSVEIEWELQKENSKRWNPEVQYTSNYAKSANVDFTVDNNGLYTEPRPIGTRYLTRPL

SEQ ID NO: 1104 - protein, 736 aa, synthetic construct
  source 1..736: note = Description of Artificial Sequence: Synthetic polypeptide
MAADGYLPDWLEDNLSEGIREWWDLKPGAPKPKANQQKQDDGRGLVLPGYKYLGPFNGLDKGEPVNAADAAALEHDKAYDQQLKAGDNPYLRYNHADAEFQERLQEDTSFGGNLGRAVFQAKKRVLEPLGLVEEGAKTAPGKRRPVEQSPQEPDSSSGIGKTGQQPAKKRLNFGQTGDSESVPDPQPLGEPPATPAAVGPTTMASGGGAPMADNNEGADGVGNASGNWHCDSTWLGDRVITTSTRTWALPTYNNHLYKQISSASTGASNDNHYFGYSTPWGYFDFNRFHCHFSPRDWQRLINNNWGFRPKRLNFKLFNIQVKEVTTNDGVTTIANNLTSTVQVFSDSEYQLPYVLGSAHQGCLPPFPADVFMIPQYGYLTLNNGSQAVGRSSFYCLEYFPSQMLRTGNNFTFSYTFEEVPFHSSYAHSQSLDRLMNPLIDQYLYYLNRTQNQSGSAQNKDLLFSRGSPAGMSVQPKNWLPGPCYRQQRVSKTKTDNNNSNFTWTGASKYNLNGRESIINPGTAMASHKDDEDKFFPMSGVMIFGKESAGASNTALDNVMITDEEEIKATNPVATERFGTVAVNFQSSSTDPATGDVHAMGALPGMVWQDRDVYLQGPIWAKIPHTDGHFHPSPLMGGFGLKNPPPQILIKNTPVPANPPAEFSATKFASFITQYSTGQVSVEIEWELQKENSKRWNPEVQYTSNYAKSANVDFTVDNNGLYTEPRPIGTRYLTRPL

SEQ ID NO: 1105 - protein, 736 aa, synthetic construct
  source 1..736: note = Description of Artificial Sequence: Synthetic polypeptide
MAADGYLPDWLEDNLSEGIREWWDLKPGAPKPKANQQKQDDGRGLVLPGYKYLGPFNGLDKGEPVNAADAAALEHDKAYDQQLKAGDNPYPRYNHADAEFQERLQEDTSFGGNLGRAVFQAKKRVLEPLGLVGEGAKTAPGKKRPVEQSPQEPDSSSGIGKTGQQPAKKRLNFGQTGDSESVPDPQPLGEPPATPAAVGPTTMASGGGAPMADNNEGADGVGNASGNWHCDSTWLGDRVITTSTRTWALPTYNNHLYKQISSASTGASNDNHYFGYSTPWGYFDFNRFHCHFSPRDWQRLINNNWGFRPKRLNFKLFNIQVKEVTTNDGVTTIANNLTSTVQVFSDSEYQLPYVLGSAHQGCLPPFPADVFMIPQYGYLTLNNGSQAVGRSSFYCLEYFPSQMLRTGNNFTFSYTFEEVPFHSSYAHSQSLDRLMNPPIDQYLYYLNRTQNQSGSAQNKDLLFSRGSPAGMSVQPKNWLPGPCYRQQRVSKTKTDNNNSNFTWTGASKYNLNGRESIINPGTAMASHKDDEDKFFPMSGVMIFGKESAGASNTALDNVMITDEEEIKATNPVATERFGTVAVNFQSSSTDPATGDVHAMGALPGMVWQDRDVYLQGPIWAKIPHTDGHFHPSPLMGGFGLKNPPPQILIKNTPVPANPPAEFSATKFASFITQYSTGQVSVEIEWELQKENSKRWNPEVQYTSNYAKSANVDFTVDNNGLYTEPRPIGTRYLTRPL

SEQ ID NO: 1106 - protein, 736 aa, synthetic construct
  source 1..736: note = Description of Artificial Sequence: Synthetic polypeptide
MAADGYLPDWLEDNLSEGIREWWDLKPGAPKPKANQQKQDDGRGLVLPGYKYLGPFNGLDKGEPVNAADAAALEHDKAYDQQLKAGDNPYLRYNHADAEFQERLQEDTSFGGNLGRAVFQAKKRVLEPLGLVEEGAKTAPGKKRPVEQSPQEPDSSSGIGKTGQQPAKKRLNFGQTGDSESVPDPRPLGEPPATPAAVGPTTMASGGGAPMADNNEGADGVGNASGNWHCDSTWLGDRVITTSTRTWALPTYNNHLYKQISSASTGASNDNHYFGYSTPWGYFDFNRFHCHFSPRDWQRLINNNWGFRPKRLNFKLFNIQVKEVTTNDGVTTIANNLTSTVQVFSDSEYQLPYVLGSAHQGCLPPFPADVFMIPQYGYLTLNNGSQAVGRSSFYCLEYFPSQMLRTGNNFTFSYTFEEVPFHSSYAHSQSLDRLMNPLIDQYLYYLNRTQNQSGSAQNKDLLFSRGPPAGMSVQPKNWLPGPCYRQQRVSKTKTDNNNSNFTWTGASKYNLNGRESIINPGTAMASHKDDEDKFFPMSGVMIFGKESAGASNTALDNVMITDEEEIKATNPVATERFGTVAVNFQSSSTDPATGDVHAMGALPGMVWQDRDVYLQGPIWAKIPHTDGHFHPSPLMGGFGLKNPPPQILIKNTPVPANPPAEFSATKFASFITQYSTGQVSVEIEWELQKENSKRWNPEVQYTSNYAKSANVDFTVDNNGLYTEPRPIGTRYLTRPL

SEQ ID NO: 1107 - protein, 736 aa, synthetic construct
  source 1..736: note = Description of Artificial Sequence: Synthetic polypeptide
MAADGYLPDWLEDNLSEGIREWWDLKPGAPKPKANQQKQDDGRGLVLPGYKYLGPFNGLDKGEPVNAADAAALEHDKAYDQQLKAGDNPYLRYNHADAEFQERLQEDTSFGGNLGRAVFQAKKRVLEPLGLVEEGAKTAPGKKRPVEQSPQEPDSSSGIGKTGQQPAKKRLNFGQTGGSESVPDPQPLGEPPATPAAVGPTTMASGGGAPMADNNEGADGVGNASGNWHCDSTWLGDRVITTSTRTWALPTYNNHLYKQISSASTGASNDNHYFGYSTPWGYFDFNRFHCHFSPRDWQRLINNNWGFRPKRLNFKLFNIQVKEVTTNDGVTTIANNLTSTVQVFSDSEYQLPYVLGSAHQGCLPPFPADVFMIPQYGYLTLNNGSQAVGRSSFYCLEYFPSQMLRTGNNFTFSYTFEEVPFHSSYAHSQSLDRLMNPPIDQYLYYLNRTQNQSGSAQNKDLLFSRGSPAGMSVQPKNWLPGPCYRQQRVSKTKTDNNNSNFTWTGASKYNLNGRESIINPGTAMASHKDDEDKFFPMSGVMIFGKESAGASNTALDNVMITDEEEIKATNPVATERFGTVAVNFQSSSTDPATGDVHAMGALPGMVWQDRDVYLQGPIWAKIPHTDGHFHPSPLMGGFGLKNPPPQILIKNTPVPANPPAEFSATKFASFITQYSTGQVSVEIEWELQKENSKRWNPEVQYTSNYAKSANVDFTVDNNGLYTEPRPIGTRYLTRPL

SEQ ID NO: 1108 - protein, 736 aa, synthetic construct
  source 1..736: note = Description of Artificial Sequence: Synthetic polypeptide
MAADGYLPDWLEDNLSEGIREWWDLKPGAPKPKANQQKQDDGRGLVLPGYKYLGPFNGLDKGEPVNAADAAALEHDKAYDQQLKAGDNPYLRYNHADAEFQERLQEDTSFGGNLGRAVFQAKKRVLEPLGLVEEGAKTAPGKKRPVEQSPQEPDSSSGIGKTGQQPAKKRLNFGQTGDSESVPDPQPLGEPPATPAAVGPTTMASGGGAPMADNNEGADGVGNASGNWHCDSTWLGDRVITTSTRTWALPTYNNHLYKQISSASTGASNDNHYFGYSTPWGYFDFNRFHCHFSPRDWQRLINNNWGFRPKRLNFKLFNIQVKEVTTNDGVTTIANNLTSTVQVFSDSEYQLPYVLGSAHQGCLPPFPADVFMIPQYGYLTLNNGSQAVGRSSFYCLEYFPSQMLRTGNNFTFSYTFEEVPFHSSYAHSQSLDRLMNPLIDQYLYYLNRTQNQSGSAQNKDLLFSRGSPAGMSVQPKNWLPGPCYRQQRVSKTKTDNNNSNFTWTGASKYNLNGRESIINPGTAVASHKDDEDKFFPMSGVMIFGKESAGASNTALDNVMITDEEEIKATNPVATERFGTVAVNFQSSSTDPATGDVHAMGALPGMVWQDRDVYLQGPIWAKIPHTDGHFHPSPLMGGFGLKNPPPQILIKNTPVPANPPAEFSATKFASFITQYSTGQVSVEIEWELQKENSKRWNPEVQYTSNYAKSANVDFTVDNNGLYTEPRPIGTRYLTRPL

SEQ ID NO: 1109 - protein, 736 aa, synthetic construct
  source 1..736: note = Description of Artificial Sequence: Synthetic polypeptide
MAADGYLPDWLEDNLSEGIREWWDLKPGAPKPKANQQKQDDGRGLVLPGYKYLGPFNGLDKGEPVNAADAAALEHDKAYDQQLKAGDNPYLRYNHADAEFQERLQEDTSFGGNLGRAVFQAKKRVLEPLGLVEEGAKTAPGKKRPVEQSPQEPDSSSGIGKTGQQPAKKRLNFGQTGDSESVPDPQPLGEPPATPAAVGPTTMASGGGAPMADNNEGADGVGNASGNWHCDSTWLGDRVITTSTRTWALPTYNNHLYKQISSASTGASNDNHYFGYSTPWGYFDFNRFHCHFSPRDWQQLINNNWGFRPKRLNFKLFNIQVKEVTTNDGVTTIANNLTSTVQVFSDSEYQLPYVLGSAHQGCLPPFPADVFMIPQYGYLTLNNGSQAVGRSSFYCLEYFPSQMLRTGNNFTFSYTFEEVPFHSSYAHSQSLDRLMNPLIDQYLYYLNRTQNQSGSAQNKDLLFSRGSPAGMSVQPKNWLPGPCYRQQRVSKTKTDNNNSNFTWTGASKYNLNGRESIINPGTAMASHKDDEDKFFPMSGVMIFGKESAGASNTALDNVMITDEEEIKATNPVATERFGTVAVNFQSTSTDPATGDVHAMGALPGMVWQDRDVYLQGPIWAKIPHTDGHFHPSPLMGGFGLKNPPPQILIKNTPVPANPPAEFSATKFASFITQYSTGQVSVEIEWELQKENSKRWNPEVQYTSNYAKSADVDFTVDNNGLYTEPRPIGTRYLTRPL

SEQ ID NO: 1110 - protein, 736 aa, synthetic construct
  source 1..736: note = Description of Artificial Sequence: Synthetic polypeptide
MAADGYLPDWLEDNLSEGIREWWDLKPGAPKPKANQQKQDDGRGLVLPGYKYLGPFNGLDKGEPVNAADAAALEHDKAYDQQLKAGDNPYLRYNHADAEFQERLQEDTSFGGNLGRAVFQAKKRVLEPLGLVEEGAKTAPGKKRPVEQSPQEPDSSSGIGKTGQQPAKKRLNFGQTGDSESVPDPQPLGEPPATPAAVGPTTMASGGGAPMADNNEGADGVGNASGNWHCDSTWLGDRVITTSTRTWALPTYNNHLYKQISSASTGASNDNHYFGYSTPWGYFDFNRFHCHFSPRDWQRLINNNWGFRPKRLNFKLFNIQVKEVTTNDGVTTIANNLTSTVQVFSDSEYQPPYVLGSAHQGCLPPFPADVFMIPQYGHLTLNNGSQAVGRSSFYCLEYFPSQMLRTGNNFTFSYTFEEVPFHSSYAHSQSLDRLTNPLIDQYLYYLNRTQNQSGSAQNKDLLFSRGSPAGMSVQPKNWLPGPCYRQQRVSKTKTDNNNSNFTWTGASKYNLNGRESIINPGTAMASHKDDEDKFFPMSGVMIFGKESAGASNTALDNVMITDEEEIKATNPVATERFGTVAVNFQSSSTDPATGDVHAMGALPGMVWQDRDVYLQGPIWAKIPHTDGHFHPSPLMGGFGLKNPPPQILIKNTPVPANPPAEFSATKFASFITQYSTGQVSVEIEWELQKENSKRWNPEVQYTSNYAKSANVDFTVDNNGLYTEPRPIGTRYLTRPL

SEQ ID NO: 1111 - protein, 736 aa, synthetic construct
  source 1..736: note = Description of Artificial Sequence: Synthetic polypeptide
MAADGYLPDWLEDNLSEGIREWWDLKPGAPKPKANQQEQDDGRGLVLPGYKYLGPFNGLDKGEPVNAADAAALEHDKAYDQQLKAGDNPYLRYNHADAEFQERLQEDTSFGGNLGRAVFQAKKRVLEPLGLVEEGAKTAPGKKRPVEQSPQEPDSSSGIGKTGQQPAKKRLNFGQTGDSESVPDPQPLGEPPATPAAVGPTTMASGGGAPMADNNEGADGVGNASGNWHCDSTWLGDRVITTSTRTWALPTYNNHLYKQISSASTGASNDNHYFGYSTPWGYFDFNRFHCHFSPRDWQRLINNNWGFRPKRLNFKLFNIQVKEVTTNDGVTTIANNLTSTVQVFSDSEYQLPYVLGSAHQGCLPPFPADVFMIPQYGYLTLNNGSQAVGRSSFYCLEYFPSQMLRTGNNFTFSYTFEEVPFHSSYAHSQSLDRLMNPLIDQYLYYLNRTQNQSGSAQNKDLLFSRGSPAGMSVQPKNWLPGPCYRQQRVSKTKTDNNNSNFTWTGASKYNLNGRESIINPGTAMASHKDDEDKFFPMSGVMIFGKESAGASNTALDNVMITDEEEIKATNPVATERFGTVAVNFQSSSTDPATGDVHATGTLPGMVWQDRDVYLQGPIWAKIPHTDGHFHPSPLMGGFGLKNPPPQILIKTTPVPANPPAEFSATKFASFITQYSTGQVSVEIEWELQKENSKRWNPEVQYTSNYAKSANVDFTVDDNGLYTEPRPIGTRYLTRPL

SEQ ID NO: 1112 - protein, 736 aa, synthetic construct
  source 1..736: note = Description of Artificial Sequence: Synthetic polypeptide
MAADGYLPDWLEDNLSEGIREWWDLKPGAPKPKANQQKQDDGRGLVLPGYKYLGPFNGLDKGEPVNAADAAALEHDKAYDQQLKAGDNPYLRYNHADAEFQERLQEDTSFGGNLGRAVFQAKKRVLEPLGLVEEGAKTAPGKKRPVEQSLQEPDSSSGIGKTGQQPAKKRLNFGQTGDSESVPDPQPLGEPPATPAAVGPTTMASGGGAPMADNNEGADGVGNASGNWHCDSTWLGDRVITTSTRTWALPTYNNHLYKQISSASTGASNDNHYFGYSTPWGYFDFNRFHCHFSPRDWQRLINNNWGFRPKRLNFKLFNIQVKEVTTNDGVTTIANNLTSTVQVFSDSEYQLPYVLGSAHQGCLPPFPADVFMIPQYGYLTLNNGSQAVGRSSFYCLEYFPSQMLRTGNNFTFSYTFEEVPFHSSYAHSQSLDRLMNPLIDQYLYYLNRTQNQSGSAQNKDLLFSRGSPAGMSVQPKNWLPGPCYRQQRVSKTKTDNDNSNFTWTGASKYNLNGRESIINPGTAMASHKDDEDKFFPMSGVMIFGKESAGASNTALDNVMITDEEEIKATNPVATERFGTVAVNFQSSSTDPATGDVHAMGALPGMVWQDRDVYLQGPIWAKIPHTDGHFHPSPLMGGFGLKNPPPQILIKNTPVPANPPAEFSATKFASFITQYSTGQVSVEIEWELQKENSKRWNPEVQYTSNYAKSANVDFTVDNNGLYTEPRPIGTRYLTRPL

SEQ ID NO: 1113 - protein, 736 aa, synthetic construct
  source 1..736: note = Description of Artificial Sequence: Synthetic polypeptide
MAADGYLPDWLEDNLSEGIREWWDLKPGAPKPKANQQKQDDGRGLVLPGYKYLGPFNGLDKGEPVNAADAAALEHDKAYDQQLKAGDNPYLRYNHADAEFQERLQEDTSFGGNLGRAVFQAKKRVLEPLGLVEEGAKTAPGKKRPVEQSPQEPDSSSGIGKTGQQPAKKRLNFGQTGDSESVPDPQPLGEPPATPAAVGPTTMASGGGAPMADNNEGADGVGNASGNWHCDSTWLGDRVITTSTRTWALPTYNNHLYKQISSASTGASNDNHYFGYSTPWGYFDFNRFHCHFSPRDWQRLINNNWGFRPKRLNFKLFNIQVKEVTTNDGVTTIANNLTSTVQVFSDSEYQLPYVLGSAHQGCLPPFPADVFMIPQYGYLTLNNGSQAVGRSSFYCLEYFPSQMLRTGNNFTFSYTFEEAPFHSSYAHSQSLDRLMNPLIDQYLYYLNRTQNQSGSAQNKDLLFSRGSPAGMSVQPKNWLPGPCYRQQRVSKTKTDNNNSNFTWTGASKYNLNGRESIINPGTAMASHKDDEDKFFPMSGVMIFGKESAGASNTALDNVMITDEEEIKATNPVATERFGTVAVNFQSSSTDPATGDVHAMGALPGMVWQDRDVYLQGPIWAKIPHTDGHFHPSPLMGGFGLKNPPPQILIKNTPVPANPPAEFSATKFASFITQYSTGQVSVEIEWELQKENSKRWNPEVQYTSNYAKSANVDFTVDNNGLYTEPRPVGTRYLTRPL

SEQ ID NO: 1114 - protein, 736 aa, synthetic construct
  source 1..736: note = Description of Artificial Sequence: Synthetic polypeptide
MAADGYLPDWLEDNLSEGIREWWDLKPGAPKPKANQQKQDDGRGLVLPGYKYLGPFNGLDKGEPVNAADAAALEHDKAYDQQLKAGDNPYLRYNHADAEFQERLQENTSFGGNLGRAVFQAKKRVLEPLGLVEEGAKTAPGKKRPVEQSPQEPDSSSGIGKTGQQPAKKRLNFGQTGDSESVPDPQPLGEPPATPAAVGPTTMASGGGAPMADNNEGADGVGNASGNWHCDSTWLGDRVITTSTRTWALPTYNNHLYKQISSASTGASNDNHYFGYSTPWGYFDFNRFHCHFPPRDWQRLINNNWGFRPKRLNFKLFNIQVKEVTSNDGVTTIANNLTSTVQVFSDSEYQLPYVLGSAHQGCLPPFPADVFMIPQYGYLTLNNGSQAVGRSSFYCLEYFPSQMLRTGNNFTFSYTFEEVPFHSSYAHSQSLDRLMNPLIDQYLYYLNRTQNQSGSAQNKDLLFSRGSPAGMSVQPKNWLPGPCYRQQRVSKTKTDNNNSNFTWTGASKYNLNGRESIINPGTAMASHKDDEDKFFPMSGVMIFGKESAGASNTALDNVMITDEEEIKATNPVATERFGTVAVNFQSSSTDPATGDVHAMGALPGMVWQDRDVYLQGPIWAKIPHTDGHFHPSPLMGGFGLKNPPPQILIKNTPVPANPPAEFSATKFASFITQYSTGQVSVEIEWELQKENSKRWNPEVQYTSNYAKSANVDFTVDNNGLYTEPRPIGTRYLTRPL

SEQ ID NO: 1115 - protein, 736 aa, synthetic construct
  source 1..736: note = Description of Artificial Sequence: Synthetic polypeptide
MAADGYLPDWLEDNLSEGIREWWDLKPGAPKPKANQQKQDDGRGLVLPGYKYLGPFNGLDKGEPVNAADAAALEHDKAYDQQLKAGDNPYLRYNHADAEFQERLQEDTSFGGNLGRAVFQAKKRVLEPLGLVEEGAKTAPGKKRPVEQSPQEPDSSSGIGKTGQQPAKKRLNFGQTGDSESVPDPQPLGEPPATPAAVGPTTMASGGGAPMADNNEGADGVGNASGNWHCDSTWLGDRVITTSTRTWALPTYNNHLYKQISSASTGASNDNHYFGYSTPWGYFDFNRFHCHFSPRDWQRLINNNWGFRPKRLNFKLFNIQVKEVTTNDGVTTIANNLTSTVQVFSDSEYQLPYVLGSAHQGCLPPFPADVFMIPQYGYLTLNNGSQAVGRSSFYCLEYFPSQMLRTGNNFTFSYTFEEVPFHSSYAHSQSLDRLMNPLIDQYLYYLNRTQNQSGSAQNKDLLFSRGSPAGTSVQPKNWLPGPCYRQQRVSKTKTDNNNSNFTWTGASKYNLNGRESIINPGTAMASHKDDEDKFFPMSGVMIFGKESAGASNTALDNVMITDEEEIKATNPVATERFGTVAVNFQSSSTDPATGDVHAMGALPGMVWQDRDVYLQGPIWAKIPHTDGHFHPSPLMGGFGLKNPPPQILIKNTPVPANPPAEFSATKFASFITQYSTGQVSVEIEWELQKENSKRWNPEVQYTSNYAKSANVDFTVDNNGLYTGPRPIGTRYLTRPL

SEQ ID NO: 1116 - protein, 736 aa, synthetic construct
  source 1..736: note = Description of Artificial Sequence: Synthetic polypeptide
MAADGYLPDWLEDNLSEGIREWWDLKPGAPKPKANQQKQDDGRGLVLPGYKYLGPFNGLDKGEPVNAADAAALEHDKAYDQQLKAGDNPYLRYNHADAEFQERLQEDTSFGGNLGRAVFQAKKRVLEPLGLVEEGAKTAPGKKRPVEQSPQEPDSSSGIGKTGQQPAKKRLNFGQTGDSESVPDPQPLGEPPATPAAVGPTTMASGGGAPMADNNEGADGVGNAPGNWHCDSTWLGDRVITTSTRTWALPTYNNHLYKQISSASTGASNDNHYFGYSTPWGYFDFNRFHCHFSPRDWQRLINNNWGFRPKRLNFKLFNIQVKEVTTNDGVTTIANNLTSTVQVFSDSEYQLPYVLGSAHQGCLPPFPADVFMIPQYGYLTLNNGSQAVGRSSFYCLEYFPSQMLRTGNNFTFSYTFEEVPFHSSYAHSQSLDRLMNPLIDQYLYYLNRTQNQSGSAQNKDLLFSRGSPAGMSVQPKNWLPGPCYRQQRVSKTKTDNNNSNFTWTGASKYNLNGRESIINPGTAMASHKDDEDKFFPMSGVMIFGKESAGASNTALDNVMITGEEEIKATNPVATERFGTVAVNFQSSSTDPATGDVHAMGALPGMVWQDRDVYLQGPIWAKIPHTDGHFHPSPLMGGFGLKNPPPQILIKNTPVPANPPAEFSATKFASFITQYSTGQVSVEIEWELQKENSKRWNPEVQYTSNYAKSANVDFTVDNNGLYTEPRPIGTRYLTRPL

SEQ ID NO: 1117 - protein, 736 aa, synthetic construct
  source 1..736: note = Description of Artificial Sequence: Synthetic polypeptide
MAADGYLPDWLEDNLSEGIREWWDLKPGAPKPKANQQKQDDGRGLVLPGYKYLGPFNRLDKGEPVNAADAAALEHDKAYDQQLKAGDNPYLRYNHADAEFQERLQEDTSFGGNLGRAVFQAKKRVLEPLGLVEEGAKTAPGRKRPVEQSPQEPDSSSGIGKTGQQPAKKRLNFGQTGDSESVPDPQPLGEPPATPAAVGPTTMASGGGAPMADNNEGADGVGNASGNWHCDSTWLGDRVITTSTRTWALPTYNNHLYKQISSASTGASNDNHYFGYSTPWGYFDFNRFHCHFSPRDWQRLINNNWGFRPKRLNFKLFNIQVKEVTTNDGVTTIANNLTSTVQVFSDSEYQLPYVLGSAHQGCLPPFPADVFMIPQYGYLTLNNGGQAVGRSSFYCLEYFPSQMLRTGNNFTFSYTFEEVPFHSSYAHSQSLDRLMNPLIDQYLYYLNRTQNQSGSAQNKDLLFSRGSPAGMSVQPKNWLPGPCYRQQRVSKTKTDNNNSNFTWTGASKYSLNGRESIINPGTAMASHKDDEDKFFPMGGVMIFGKESAGASNTALDNAMITDEEEIKATNPVATERFGTVAVNFQSSSTDPATGDVHAMGALPGMVWQDRDVYLQGPIWAKIPHTDGHFHPSPLMGGFGLKNPPPQILIKNTPVPANPPAEFSATKFASFITQYSTGQVSVEIEWELQKENSKRWNPEVQYTSNYAKSANVDFTVDNNGLYTEPRPIGTRYLTRPL

SEQ ID NO: 1118 - protein, 736 aa, synthetic construct
  source 1..736: note = Description of Artificial Sequence: Synthetic polypeptide
MAADGYLPDWLEDNLSEGIREWWDLKPGAPKPKANQQKQDDGRGLVLPGYKYLGPFNGLDKGEPVNAADAAALEHDKAYDQQLKAGDNPYLRYNHADAEFQERLQEDTSFGGNLGRAVFQAKKRVLEPLGLVEEGAKTAPGKKRPVEQSPQEPDSSSGIGKTGQQPAKKRLNFGQTGDSESVPDPQPLGEPPATPAAVGPTTMASGGGAPMADNNEGADGVGNASGNWHCDSTWLGGRVITTSTRTWALPTYNNHLYKQISSASTGASNDNHYFGYSTPWGYFDFNRFHCHFSPRDWQRLINNNWGFRPKRLNFKLFNIQVKEVTTNDGVTTIANNLTSTVQVFSDSEYQLPYVLGSAHQGCLPPFPADVFMIPQYGYLTLNNGSQAVGRSSFYCLEYFPSQMLRTGNNSTFSYTFEEVPFHSSYAHSQSLDRLMNPLIDQYLYYLNRTQNQSGSAQNKDLLFSRGSPAGMSVQPKNWLPGPCYRQQRVSKTKTDNNNSNFTWTGASKYNLNGRESIINPGTAMASHKDDEDKFFPMSGVMIFGKESAGASNTALDNVMITDEEEIKATNPVATERFGTVAVNFQSSSTDPATGDVHAMGTLPGMVWQDRDVYLQGPIWAKIPHTDGHFHPSPLMGGFGLKNPPPQILIKNTPVPANPPAEFSATKFASFITQYSTGQVSVEIEWELQKENSKRWNPEVQYTSNYAKSANVDFTVDNNGLYTEPRPIGTRYLTRPL

SEQ ID NO: 1119 - protein, 736 aa, synthetic construct
  source 1..736: note = Description of Artificial Sequence: Synthetic polypeptide
MAADGYLPDWLEDNLSEGIREWWDLKPGAPKPKANQQKQDDGRGLVLPGYKYLGPFNGLDKGEPVSAADAAALEHDKAYDQQLKAGDNPYLRYNHADAEFQERLQEDTSFGGNLGRAVFQAKKRVLEPLGLVEEGAKTAPGKKRPVEQSPQEPDSSSGIGKTGQQPAKERLNFGQTGDSESVPDPQPLGEPPATPAAVGPTTMASGGGAPMADNNEGADGVGNASGNWHCDSTWLGDRVITTSTRTWALPTYNNHLYKQISSASTGASNDNHYFGYSTPWGYFDFNRFHCHFSPRDWQRLINNNWGFRPKRLNFKLFNIQVKEVTTNDGVTTIANNLTSTVQVFSDSEYQLPYVLGSAHQGCLPPFPADVFMIPQYGYLTLNNGSQAVGRSSFYCLEYFPSQMLRTGNNFTFSYTFEEVPFHSSYAHSQSLDRLMNPLIDQYLYYLNRTQNQSGSAQNKDLLFSRGSPAGMSVQPKNWLPGPCYRQQRVSKTKTDNNNSNFTWTGASKYNLNGRESIINPGTAMASHKDDEDKFFPMSGVMIFGKESAGASNTALDNVMITDEEEIKATNPVATERFGTVAVNFQSSSTDPATGDVHAMGALPGMVWQDRDVYLQGPIWAKIPHTDGHFHPSPLMGGFGLKNPPPQILIKNTPVPANPPAEFSATKFASFITQYSTGQVSVEIEWELQKENSKRWNPEVQYTSNYAKSANVDFTVDNNGLYTEPRPIGTRYLTRPL

SEQ ID NO: 1120 - protein, 736 aa, synthetic construct
  source 1..736: note = Description of Artificial Sequence: Synthetic polypeptide
MAADGYLPDWLEDNLSEGIREWWDLKPGAPKPKANQQKQDDGRGLVLPGYKYLGPFNGLDKGEPVNAADAAALEHDKAYDQQLKAGDNPYLRYNHADAEFQERLQEDTSFGGNLGRAVFQAKKRVLEPLGLVEEGAKTAPGKKRPVEQSPQEPDSSSGIGKTGQQPAKKRLNFGQTGDSESVPDPQPLGEPPATPAAVGPTTMASGGGAPMADNNEGADGVGNASGNWHCDSTWLGDRVITTSTRTWALPTYNNHLYKQISSASTGASNDNHYFGYSTPWGYFDFNRFHCHFSPRDWQRLINNNWGFRPKRLNFKLFNIQVKEVTTNDGVTTIANNLTSTVQVFSDSEYQLPYVLGSAHQGCLPPFPADVFMIPQYGYLTLNNGSQAVGRSSFYCLEYFPSQMLRTGNNFTFSYTFEEVPFHSSYAHSQSLDRLMNPLIDQYLYYLNRTQNQSGSAQNKDLLFSRGSPAGMSVQPKNWLPGPCYRQQRVSKTKTDNNNSNFTWTGASKYNLNGRESIINPGTAMASHKDDEDKFFPMSGVMIFGKESAGASNTALDNVMITDEGEIKATNPVATERFGTVAVNFQSSSTDPATGDVHAMGALPGMVWQDRDVYLQGPIWAKIPHTDGHFHPSPLMGGFGLKNPPPQILIKNTPVPANPPAEFSATKFASFITQYSTGQVSVEIEWELQKENSKRWNPEVQYTSNYAKSANVDFTVDNNGLYTEPRPIGTRYLTRPL

SEQ ID NO: 1121 - protein, 736 aa, synthetic construct
  source 1..736: note = Description of Artificial Sequence: Synthetic polypeptide
MAADGYLPDWLEDNLSEGIREWWDLKPGAPKPKANQQKQDDGRGLVLPGYKYLGPFNGLDKGEPVNAADAAALEHDKAYDQQLKAGDNPYLRYNHADAEFQERLQEDTSFGGNLGRAVFQAKKRVLEPFGLVEEGAKTAPGKKRPVEQSPQEPDSSSGIGKTGQQPAKKRLNFGQTGDSESVPDPQPLGEPPATPAAVGPTTMASGGGAPMADNNEGADGVGNASGNWHCDSTWLGDRVITTSTRTWALPTYNNHLYKQISSASTGASNDNHYFGYSTPWGYFDFNRFHCHFSPRDWQRLINNNWGFRPKRLNFKLFNIQVKEVTTNDGVTTIANNLTSTVQVFSDSEYQLPYVLGSAHQGCLPPFPADVFMIPQYGYLTLNNGSQAVGRSSFYCPEYFPSQMLRTGNNFTFSYTFEEVPFHSSYAHSQSLDRLMNPLIDQYLYYLNRTQNQSGSAQNKDLLFSRGSPAGMSVQPKNWLPGPCYRQQRVSKTKTDNNNSNFTWTGASKYNLNGRESIINPGTAMASHKDDKDKFFPMSGVMIFGKESAGASNTALDNVMITDEEEIKATNPVATERFGTVAVNFQSSNTDPATGDVHVMGALPGMVWQDRDVYLQGPIWAKIPHTDGHFHPSPLMGGFGLKHPPPQILIKNTPVPANPPAEFSATKFASFITQYSTGQVSVEIEWELQKENSKRWNPEVQYTSNYAKSANVDFTVDNNGLYTEPRPIGTRYLTRPL

SEQ ID NO: 1122 - protein, 736 aa, synthetic construct
  source 1..736: note = Description of Artificial Sequence: Synthetic polypeptide
MAADGYLPDWLEDNLSEGIREWWDLKPGAPKPKANQQKQDDGRGLVLPGYKYLGPFNGLDKGEPVNAADAAALEHDKAYDQQLKAGDNPYLRYNHADAEFQERLQEDTSFGGNLGRAVFQAKKRVLEPFGLVEEGAKTAPGKKRPVEQSPQEPDSSSGIGKTGQQPAKKRLNFGQTGDSESVPDPQPLGEPPATPAAVGPTTMASGGGAPMADNNEGADGVGNASGNWHCDSTWLGDRVITTSTRTWALPTYNNHLYKQISSASTGASNDNHYFGYSTPWGYFDFNRFHCHFSPRDWQRLINNNWGFRPKRLNFKLFNIQVKEVTTNDGVTTIANNLTSTVQVFSDSEYQLPYVLGSAHQGCLPPFPADVFMIPQYGYLTLNNGSQAVGRSSFYCLEYFPSQMLRTGNNFTFSYTFEEVPFHSSYAHSQSLDRLMNPLIDQYLYYLNRTQNQSGSAQNKDLLFSRGSPAGMSVQPKNWLPGPCYRQQRVSKTKTDNNNSNFTWTGASKYNLNGRESIINPGTAMASHKDDKDKFFPMSGVMIFGKESAGASNTALDNVMITDEEEIKATNPVATERFGTVAVNFQSSDTDPATGDVHVMGALPGMVWQDRDVYLQGPIWAKIPHTDGHFHPSPLMGGFGLKHPPPQILIKNTPVPANPPAEFSATKFASFITQYSTGQVSVEIEWELQKENSKRWNPEVQYTSNYAKSANVDFTVDNNGLYTEPRPIGTRYLTRPL

SEQ ID NO: 1123 - protein, 736 aa, synthetic construct
  source 1..736: note = Description of Artificial Sequence: Synthetic polypeptide
MAADGYLPDWLEDNLSEGIREWWDLKPGAPKPKANQQKQGDGRGLVLPGYKYLGPFNGLDKGEPVNAADAAALEHDKAYDQQLKAGDNPYLRYNHADAEFQERLQEDTSFGGNLGRAVFQAKKRVLEPFGLVEEGAKTAPGKKRPVEQSPQEPDSSSGIGKTGQQPAKKRLNFGQTGDSESVPDPQPLGEPPATPAAVGPTTMASGGGAPMADNNEGADGVGNASGNWHCDSTWLGDRVITTNTRTWALPTYNNHLYKQISSASTGASNDNHYFGYSTPWGYFDFNRFHCHFSPRDWQRLINNNWGFRPKRLNFKLFNIQVKEVTTNDGVTTIANNLTSTVQVFSDSEYQLPYVLGSAHQGCLPPFPADVFMIPQYGYLTLNNGSQAVGRSSFYCLEYFPSQMLRTGNNFTFSYTFEEVPFHSSYGHSQSLDRLMNLLIDQYLYYLNRTQNQSGSAQNKDLLFSRGSPAGMFVQPKNWLPGPCYRQQRVSKTKTDNNNSNFTWTGASKYNLNGRESIINPGTAMASHKDDEDKFFPMSGVMIFGKESAGASNTALDNVMITDEEEIKATNPVATERFGTVAVNFQSSSTDPATGDVHVMGALPGMVWQDRDVYLQGPIWAKIPHTDGHFHPSPLMGGFGLKHPPPQILIKNTPVPANPPAEFSATKFASFITQYSTGQVSVEIEWELQKENSKRWNPEVQYTSNYAKSANVDFTVDNNGLYTEPRPIGTRYLTRPL

SEQ ID NO: 1124 - protein, 736 aa, synthetic construct
  source 1..736: note = Description of Artificial Sequence: Synthetic polypeptide
MAADGYLPDWLEDNLSEGIREWWDLKPGAPKPKANQQKQDDGRGLVLPGYKYLGPFNGLDKGEPVNAADAAALEHDKAYDQQLKAGDNPYLRYNHADAEFQERLQEDTSFGGNLGRAVFQAKKRVLEPFGLVEEGAKTAPGKKRPVEQSPQEPDSSSGIGKTGQQPAKKRLNFGQTGDSESVPDPQPLGEPPATPAAVGPTTMASGGGAPMADNNEGADGVGNASGNWHCDSTWLGDRVITTNTRTWALPTYNNHLYKQISSASTGASNDNHYFGYSTPWGYFDFNRFHCHFSPRDWQRLINNNWGFRPKRLNFKLFNIQVKEVTTNDGVTTIANNLTSTVQVFSDSEYQLPYVLGSAHQGCLPPFPADVFMIPQYGYLMLNNGSQAVGRSSFYCLEYFPSQMLRTGNNFTFSYTFEEVPFHSSYAHSQSLDRLMNPLIDQYLYYLNRTQNQSGSAQNKDLLFSRGSPAGMSVQPKNWLPGPCYRQQRVSKTKTDNNNSNFTWTGASKYNLNGRESIINPGTAMASHKDDEDKFFPMSGVMIFGKESAGASNTALDNVMITDEEEIKATNPAATERFGTVAVNFQSSSTDPATGDVHVMGALPGMVWQDRDVYLQGPIWAKIPHTDGHFHPSPLMGGFGLKHPPPQILIKNTPVPANPPAEFSATKFASFITQYSTGQVSVEIEWELQKENSKRWNPEVQYTSNYAKSANVDFTVDNNGLYTEPRPIGTRYLTRPL

SEQ ID NO: 1125 - protein, 736 aa, synthetic construct
  source 1..736: note = Description of Artificial Sequence: Synthetic polypeptide
MAADGYLPDWLEDNLSEGIREWWDLKPGAPKPKANQQKQDDGRGLVLPGYKYLGPFNGLDKGEPVNAADAAALEHDKAYDQQLKAGDNPYLRYNHADAEFQERLQEDTSFGGNLGRAVFQAKKRVLEPFGLVEEGAKTAPGKKRPVEQSPQEPDSSSGIGKTGQQPAKKRLNFGQTGDSESVPDPQPLGEPPATPAAVGPTTMASGGGAPMADNNEGADGVGNASGNWHCDSTWLGDRVITTSTRTWALPTYNNHLYKQISSASTGASNDNHYFGYSTPWGYFDFNRFHCHFSPRDWQRLINNNWGFRPKRLNFKLFNIQVKEVTTNDGVTTIANNLTSTVQVFSDSEYQLPYVLGSAHQGCLPPFPADVFMIPQYGYLTLNNGSQAVGRSSFYCLEYFPSQMLRTGNNFTFSYTFEEVPFHSSYAHSQSLDRLMNPLIDQYLYYLNRTQNQSGSAQNKDLLFSRGSPAGMSVQPKNWLPGPCYRQQRVSKTKTDNNNSNFTWTGASKYNLNGRESIINPGTAMASHKDDEDKFFPMSGVMIFGKESAGASNTALDNVMITDEEEIKATNPVATERFGTVAVNFQSSSTDPATGDVHVMGALPGMVWQDRDVYLQGPIWAKIPHTDGHFHPSPLMGGFGLKHPPPQILIKNTPVPANPPAEFSATKFASFITQYSTGQVSVEIEWELQKENSKRWNPEVQYTSNYAKSANVDFTVDNNGLYTEPRPIGTRYLTRPL

SEQ ID NO: 1126 - protein, 736 aa, synthetic construct
  source 1..736: note = Description of Artificial Sequence: Synthetic polypeptide
  VARIANT 102: note = MOD_RES - Any amino acid
MAADGYLPDWLEDNLSEGIREWWDLKPGAPKPKANQQKQDDGRGLVLPGYKYLGPFNGLDKGEPVNAADAAALEHDKAYDQQLKAGDNPYLRYNHADAEFQXRLQEDTSFGGNLGRAVFQAKKRVLEPFGLVEEGAKTAPGKKRPVEQSPQEPDSSSGIGKTGQQPAKKRLNFGQTGDSESVPDPQPLGEPPATPAAVGPTTMASGGGAPMADNNEGADGVGNASGNWHCDSTWLGGRVITTSTRTWALPTYNNHLYKQISSASTGASNDNHYFGHSTPWGYFDFNRFHCHFSPRDWQRLINNNWGFRPKRLNFKLFNIQVKEVTTNDGVTTIANNLTSTVQVFSDSEYQLPYVLGSAHQGCLPPSPADVFMIPQYGYLTLNNGSQAVGRSSFYCLEYFPSQMLRTGNNFTFSYTFEEVPFHSSYAHSQSLDRLMNPLIDQYLYYLNRTQNQSGSAQNKDLLFSRGSPAGMSVQPKNWLPGPCYRQQRVSKTKTDNNNSNFTWTGASKYNLNGRESIINPGTAMASHKDDKDKFFPMSGVMIFGKESAGASNTALDNVMITDEEEIKATNPVATERFGTVAVNFQSSNTDPATGDVHVMGALPGMVWQDRDVYLQGPIWAKIPHTDGHFHPSPLMGGFGLKHPPPQILIKNTPVPANPPAEFSATKFASFITQYSTGQVSVEIEWELQKENSKRWNPEVQYTSNYAKSANVDFTVDNNGLYTEPRPIGTRYLTRPL

SEQ ID NO: 1127 - protein, 736 aa, synthetic construct
  source 1..736: note = Description of Artificial Sequence: Synthetic polypeptide
MAADGYFPDWLEDNLSEGIREWWDLKPGAPKPKANQQKQDDGRGLVLPGYKYLGPFNGLDKGEPVNAADAAALEHDKAYDQQLKAGDNPYLRYNHADAEFQERLQEDTSFGGNLGRAVFQAKKRVLEPFGLVEEGAKTAPGKKRPVEQSPQEPDSSSGIGRTGQQPAKKRLNFGQTGDSESVPDPQPLGEPPATPAAVGPTTMASGGGAPMADNNEGADGVGNASGNWHCDSTWLGDRVITTSTRTWALPTYNNHLYKQISSASTGASNDNHYFGYSTPWGYFDFNRFHCHFSPRDWQRLINNNWGFRPKRLNFKLFNIQVKEVTTNDGVTTIANNLTSTVQVFSDSEYQLPYVLGSAHQGCLPPFPADVFMIPQYGYLTLNNGSQAVGRSSFYCLEYFPSQMLRTGNNFTFSYTFEEVPFHSSYAHSQSLDRLMNPLIDQYLYYLNRTQNQSGSAQNKDLLFSRGSPAGMSVQPKNWLPGPCYRQQRVSKTKTDNNNSNFTWTGASKYNLNGRESIINPGTAMASHKDDEDKFFPMSGVMIFGKESAGASNTALDNVMITDEEEIKATNPVATERFGTVAVNFQSSSPDPATGDVHVMGALPGMVWQDRDVYLQGPIWAKIPHTDGHFHPSPLMGGFGLKHPPPQILIKNTPVPANPPAEFSATKFASFITQYSTGQVSVEIEWELQKENSKRWNPEVQYTSNYAKSANVDFTVDNNGLYSEPRPIGTRYLTRPL

SEQ ID NO: 1128 - protein, 736 aa, synthetic construct
  source 1..736: note = Description of Artificial Sequence: Synthetic polypeptide
MAADGYLPDWLEDNLSEGIREWWDLKPGAPKPKANQQKQDDGRGLVLPGYKYLGPFNGLDKGEPVNAADAAALEHDKAYDQQLKAGDNPYLRYNHADAEFQERLQEDTSFGGNLGRAVFQAKKRVLEPFGLVEEGAKTAPGKKRPVEQSPQEPDSSSGIGKTGQQPAKKRLNFGQTGDSESVPDPQPLGEPPATPAAVGPTTMASGGGAPMADNNEGADGVGNASGNWHCDSTWLGDRVITTSTRTWALPTYNNHLYKQTSSASTGASNDNHYFGYSTPWGYFDFNRFHCHFSPRDWQRLINNNWGFRPKRLNFKLFNIQVKEVTTNDGVTTIANNLTSTVQVFSDSEYQLPYVLGSAHQGCLPPFPADVFMIPQYGYLTLNNGSQAVGRSSFYCLEYFPSQMLRTGNNFTFSYTFEEVPFHSSYAHSQSLDRLMNPLIDQYLYYLNRTQNQSGSAQNKDLLFSRGSPAGMSVQPKNWLPGPCYRQQRVSKTKTDYNNSNFTWTGASKYNLNGRESIINPGTAMASHKDDEDKFFPMSGVMIFGKESAGASNTALDNVMITDEEEIKATNPVATERFGTVAVNFQSSSTDPATGDVHVMGALPGMVWQDRDVYLQGPIWAKIPHTDGHFHPSPLMGGFGLKHPPPQILIKNTPVPANPPAEFSATKFASFITQYSTGQVSVEIEWELQKENSKRWNPEVQYTSNYAKSANVDFTVDNNGLYTEPRPIGTRYLTRPL

SEQ ID NO: 1129 - protein, 736 aa, synthetic construct
  source 1..736: note = Description of Artificial Sequence: Synthetic polypeptide
MAADGYPPDWLEDNLSEGIREWWDLKPGVPKPKANQQKQDDGRGLVLPGYKYLGPFNGLDKGEPVNAADAAALEHDKAYDQQLKAGDNPYLRYNHADAEFQERLQEDTSFGGNLGRAVFQAKKRVLEPFGLVEEGAKTAPGKKRPVEQSPQEPDSSSGIGKTGQQPAKKRLNFGQTGDSESVPDPQPLGEPPATPAAVGPTTMASGGGAPMADNNEGADGVGNASGNWHCDSTWLGDRVITTSTRTWALPTYNNHLYKQISSASTGASNDNHYFGYSTPWGYFDFNRFHCHFSPRDWQRLINNNWGFRPKRLNFKLFNIQVKEVTTNDGVTTIANNLTSTVQVFSDSEYQLPYVLGSAHQGCLPPFPADVFMIPQYGYLTLNNGSQAVGRSSFYCLEYFPSQMLRTGNNFTFSYTFEEVPFHSSYAHSQSLDRLMNPLIDQYLYYLNRTQNQSGSAQNKDLLFSRGSPAGMSVQPKNWLPGPCYRQQRVSKTKTDNNNSNFTWTGASKYNLNGRESIINPGTAMASHKDDEDKFFPMSGVMIFGKESAGASNTALDNVMITDEEEIKATNPVATERFGTVAVNFQSSSTDPATGDVHVMGALPGMVWQDRDVYLQGPIWAKIPHTDGHFHPSPLMGGFGLKHPPPQILIKNTPVPANPPAEFSATKFASFITQYSTGQVSVEIEWELQKENSKRWNPEVQYTSNYAKSANVDFTVDNNGLYTEPRPIGTRYLTRPL

SEQ ID NO: 1130 - protein, 732 aa, synthetic construct
  source 1..732: note = Description of Artificial Sequence: Synthetic polypeptide
MAADGYLPDWLEDNLSEGIREWWDLKPGAPKPKANQQKQDDGRGLVLPGYKYLGPFNGLDKGEPVNAADAAALEHDKAYDQQLKAGDNPYLRYNHADAEFQERLQEDTSFGGNLGRAVFQAKKRVLEPFGLVEEGAKTAPGKKRPVEQSPQEPDSSSGIGKTGQQPAKKRLNFGQTGDSESVPDPQPLGEPPATPAAVGPTTMASGGGAPMADNNEGADGVGNASGNWHCDSTWLGDRVITTSTRTWALPTYNNHLYKQISSASTGASNDNHYFGYSTPWGYFDFNRFHCHFSPRDWQRLINNNWGFRPKRLNFKLFNIQVKEVTTNDGVTTIANNLTSTVQAFSDSEYQLPYVLGSAHQGCLPPFPADVFMIPQYGYLTLNNGSQAVGRSSFYCLEYFPSQMLRTGNNFTFSYTFEEVPFHSSYAHSQSLDRLMNPLIDPYLYYLNRTQNQSGSAQNKDLLFSRGSPAGMSVQPKNWLPGPCYRQQRVSKTKTDNNNSNFTWTGASKYNLNGRESIINPGTAMASHKDDEDKFFPMSGVMIFGKESAGASNTALDNVMITDEEEIKATNPVATERFGTVAVNFQSSSTDPATGDVHVMGALPGMVWQDRDVYLQGPIWAKIPHTDGHFHPSPLMGGFGLKHPPPQILIKNTPVPANPPAEFSATKFASFITQYSTGQVSVEIEWELQKENSKRWNPEVQYTSNYAKSANVDFTVDNNGLYTEPRPIGTRYL

SEQ ID NO: 1131 - protein, 736 aa, synthetic construct
  source 1..736: note = Description of Artificial Sequence: Synthetic polypeptide
MAADGYLPDWLEDNLSEGIREWWDLKPGAPKPKANQQKQDDGRGLVLPGYKYLGPFNGLDKGEPVNAADAAALEHDKAYDQQLKAGDNPYLRYNHADAEFQERLQEDTSFGGNLGRAVFQAKKRVLEPFGLVEEGAKTAPGKKRPVEQSPQEPDSSSGIGKTGQQPAKKRLNFGQTGDSESVPDPQPLGEPPATPAAVGPTTMASGGGAPMADNNEGADGVGNASGNWHCDSTWLGDRVITTSTRTWALPTYNNHLYKQISSASTGASNDNHYFGYSTPWGYFDFNRFHCHFSPRDWQRLINNNWGFRPKRLNFKLFNIQVKEVTTNDGVTTIANNLTSTVQVFSDSEYQLPYVLGSAHQGCLPPFPADVFMIPQYGYLTLNNGSQAVGRSSFYCLEYFPSQMLRTGNNFTFSYTFEEVPFHSSYAHSQSLDRLMNPLIDQYLYYLNRTQNQSGSAQNKDLLFSRGSPAGMSVQPKNWLPGPCYRQQRVSKTKTDNNNSNFTWTGASKYNLNGRESIINPGTAMASHKDDEDKFFPMSGVMIFGKESAGASNTALDNVMITDEEEIKATNPVATERFGTVAVNFQSSSTDPATGDVHVMGALPGMVWQDRDVYLQGPIWAKIPHTDGHSHPSPLMGGFGLKHPPPQILIKNTPVPANPPAEFSATKFASFITQYSTGQVSVEIEWELQKENSKRWNPEVQYTSNYAKSANVDFTVDNNGLYTEPRPIGTRYLTRPL

SEQ ID NO: 1132 - protein, 736 aa, synthetic construct
  source 1..736: note = Description of Artificial Sequence: Synthetic polypeptide
MAADGYLPDWLEDNLSEGIREWWDLKPGAPKPKANQQKQDDGRGLVLPGYKYLGPFNGLDKGEPVNAADAAALEHDKAYDQQLKAGDNPYLRYNHADAEFQERLQEDTSFGGNLGRAVFQAKKRVLEPFGLVEEGAKTAPGKKRPVEQSPQEPDSSSGIGKTGQQPAKKRLNFGQTGDSESVPDPQPLGEPPATPAAVGPTTMASGGGAPMADNNEGADGVGNASGNWHCDSTWLGDRVITTSTRTWALPTYNNHLYKQISSASTGASNDNHYFGYSTPWGYFDFNRFHCHFSPRDWQRLINNNWGFRPKRLNFKLFNIQVKEVTTNDGVTTIANNLTSTVQVFSDSEYQLPYVLGSAHQGCLPPFPADVFMIPQYGYLTLNNGSQAVGRSSFYCLEYFPSQMLRTGNNFTFSYTFEEVPFHSSYAHSQSLDRLMNPLIDLYLYYLNRTQNQSGSAQNKDLLFSRGSPAGMSVQPKNWLPGPCYRQQRVSKTKTDNNNSNFTWTGASKYNLNGRESIINPGTAMASHKDDEDKFFPMSGVMIFGKESAGTSNTALDNVMITDEEEIKATNPVATERFGTVAVNFQSSSTDPATGDVHVMGALPGMVWQDRDVYLQGPIWAKIPHTDGHFHPSPLMGGFGLKHPPPQILIKNTPVPANPPAEFSATKFASFITQYSTGQVSVEIEWELQKENSKRWNPEVQYTSNYAKSANVDFTVDNNGLYTEPRPIGTRYLTRPL

SEQ ID NO: 1133 - protein, 736 aa, synthetic construct
  source 1..736: note = Description of Artificial Sequence: Synthetic polypeptide
MAADGYLPDWLEDSLSEGIREWWDLKPGAPKPKANQQKQDDGRGLVLPGYKYLGPFNGLDKGEPVNAADAAALEHDKAYDQQLKAGDNPYLRYNHADAEFQERLQEDTSFGGNLGRAVFQAKKRVLEPFGLVEEGAKTAPGKKRPVEQSPQEPDSSSGIGKTGQQPAKKRLNFGQTGDSESVPDPQPLGEPPATPAAVGPTTMASGGGAPMADNNEGADGVGNASGNWHCDSTWLGDRVITTSTRTWALPTYNNHLYKQISSASTGASNDNHYFGYSTPWGYFDFNRFHCHFSPRDWQRLINNNWGFRPKRLNFKLFNIQVKEVTTNDGVTTIANNLTSTVQVFSDSEYQLPYVLGSAHQGCLPPFPADVFMIPQYGYLTPNNGSQAVGRSSFYCLEYFPSQMLRTGNNFTFSYTFEEVPFHSSYAHSQSLDRLMNPLIDQYQYYLNRTQNQSGSAQNKDLLFSRGSPAGMSVQPKNWLPGPCYRQQRVSKTKTDNNNSNFTWTGASKYNLNGRESIINPGTAMASHKDDEDKFFPMSGVMIFGKESAGASNTALDNVMITDEEEIKATNPVATERFGTVAVNFQSSSTDPATGDVHVMGALPGMVWQDRDVYLQGPIWAKIPHTDGHFHPSPLMGGFGLKHPPPQILIKNTPVPANPPAEFSATKFASFITQYSTGQVSVEIEWELQKENSKRWNPEVQYTSNYAKSANVDFTVDNNGLYTEPRPIGTRYLTRPL

SEQ ID NO: 1134 - protein, 736 aa, synthetic construct; identical to SEQ ID NO: 1125
  source 1..736: note = Description of Artificial Sequence: Synthetic polypeptide

SEQ ID NO: 1135 - protein, 735 aa, synthetic construct
  source 1..735: note = Description of Artificial Sequence: Synthetic polypeptide
MAADGYLPDWLEDTLSEGIRQWWKLKPGPPPPKPAERHKDDSRGLVLPGYKYLGPFNGLDKGEPVNEADAAALEHDKAYDRQLDSGDNPYLKYNHADAEFQERLKEDTSFGGNLGRAVFQAKKRVLEPLGLVEEPVKTAPGKKRPVEHSPVEPDSSSGTGKAGQQPARKRLNFGQTGDADSVPDPQPLGQPPAAPSGLGTNTMATGSGAPMADNNEGADGVGNSSGNWHCDSTWMGDRVITTSTRTWALPTYNNHLYKQISSQSGASNDNHYFGYSTPWGYFDFNRFHCHFSPRDWQRLINNNWGFRPKRLNFKLFNIQVKEVTQNDGTTTIANNLTSTVQVFTDSEYQLPYVLGSAHQGCLPPFPADVFMVPQYGYLTLNNGSQAVGRSSFYCLEYFPSQMLRTGNNFTFSYTFEDVPFHSSYAHSQSLDRLMNPLIDQYLYYLSRTNTPSGTTTQSRLQFSRAGASDIRDQSRNWLPGPCYRQQRVSKTSADNNNSEYSWTGATKYHLNGRDSLVNPGPAMASHKDDEEKFFPQSGVLIFGKQGSEKTNVDIEKVMITDEEEIRTTNPVATEQYGSVSTNLQRGNRQAATADVNTQGVLPGMVWQDRDVYLQGPIWAKIPHTDGHFHPSPLMGGFGLKHPPPQILIKNTPVPANPSTTFSAAKFASFITQYSTGQVSVEIEWELQKENSKRWNPEIQYTSNYNKSVNVDFTVDTNGVYSEPRPIGTRYLTRNL

SEQ ID NO: 1136 - DNA, 2211 bp, synthetic construct
  source 1..2211: mol_type = other DNA; note = Description of Artificial Sequence: Synthetic polynucleotide
atggctgctgacggttatcttccagattggctcgaggacaacctttctgaaggcattcgtgagtggtgggctctgaaacctggagtccctcaacccaaagcgaaccaacaacaccaggacaaccgtcggggtcttgtgcttccgggttacaaatacctcggacccggtaacggactcgacaaaggagagccggtcaacgaggcggacgcggcagccctcgaacacgacaaagcttacgaccagcagctcaaggccggtgacaacccgtacctcaagtacaaccacgccgacgccgagtttcaggagcgtcttcaagaagatacgtcttttgggggcaaccttggcagagcagtcttccaggccaaaaagaggatccttgagcctcttggtctggttgaggaagcagctaaaacggctcctggaaagaagaggcctgtagatcagtctcctcaggaaccggactcatcatctggtgttggcaaatcgggcaaacagcctgccagaaaaagactaaatttcggtcagactggcgactcagagtcagtcccagaccctcaacctctcggagaaccaccagcagcccccacaagtttgggatctaatacaatggcttcaggcggtggcgcaccaatggcagacaataacgagggtgccgatggagtgggtaattcctcaggaaattggcattgcgattcccaatggctgggcgacagagtcatcaccaccagcaccagaacctgggccctgcccacttacaacaaccatctctacaagcaaatctccagccaatcaggagcttcaaacgacaaccactactttggctacagcaccccttgggggtattttgactttaacagattccactgccacttctcaccacgtgactggcagcgactcattaacaacaactggggattccggcccaagaaactcagcttcaagctcttcaacatccaagttaaagaggtcacgcagaacgatggcacgacgactattgccaataaccttaccagcacggttcaagtgtttacggactcggagtatcagctcccgtacgtgctcgggtcggcgcaccaaggctgcctcccgccgtttccagcggacgtcttcatggtccctcagtatggatacctcaccctgaacaacggaagtcaagcggtgggacgctcatccttttactgcccggagtacttcccttcgcagatgctaaggactggaaataacttccaattcagctataccttcgaggatgtaccttttcacagcagctacgctcacagccagagtttggatcgcttgatgaatcctcttattgatcagtatctgtactacctgaacagaacgcaaggaacaacctctggaacaaccaaccaatcacggctgctttttagccaggctgggcctcagtctatgtctttgcaggccagaaattggctacctgggccctgctaccggcaacagagactttcaaagactgctaacgacaacaacaacagtaactttccttggacagcggccagcaaatatcatctcaatggccgcgactcgctggtgaatccaggaccagctatggccagtcacaaggacgatgaagaaaaatttttccctatgcacggcaatctaatatttggcaaagaagggacaacggcaagtaacgcagaattagataatgtaatgattacggatgaagaagagattcgtaccaccaatcctgtggcaacagagcagtatggaactgtggcaaataacttgcagagctcaaatacagctcccacgactagaactgtcaatgatcagggggccttacctggcatggtgtggcaagatcgtgacgtgtaccttcaaggacctatctgggcaaagattcctcacacggatggacactttcatccttctcctctgatgggaggctttggactgaaacatccgcctcctcaaatcatgatcaaaaatactccggtaccggcaaatcctccgacgactttcagcccggccaagtttgcttcatttatcactcagtactccactggacaggtcagcgtggaaattgagtgggagctacagaaagaaaacagcaaacgttggaatccagagattcagtacacttccaactacaacaagtctgttaatgtggactttactgtagacactaatggtgtttatagtgaacctcaccctattggaacccggtatctcacacgaaacttgtaa

SEQ ID NO: 1137 - DNA, 2211 bp, synthetic construct
  source 1..2211: mol_type = other DNA; note = Description of Artificial Sequence: Synthetic polynucleotide
atggctgctgatggttatcttccagattggctcgaggacaacctttctgaaggcattcgtgagtggtgggctctgaaacctggagtccctcaacccaaagcgaaccaacaacaccaggacaaccgtcggggtcttgtgcttccgggttacaaatacctcggacccggtaacggactcgacaaaggagagccggtcaacgaggcggacgcggcagccctcgaacacgacaaagcttacgaccagcagctcaaggccggtgacaacccgtacctcaagtacaaccacgccgacgccgagtttcaggagcgtcttcaagaagatacgtcttttgggggcaaccttggcagagcagtcttccaggccaaaaagaggatccttgagcctcttggtctggttgaggaagcagctaaaacggctcctggaaagaagaggcctgtagatcagtctcctcaggaaccggactcatcatctggtgttggcaaatcgggcaaacagcctgccagaaaaagactaaatttcggtcagactggcgactcagagtcagtcccagaccctcaacctctcggagaaccaccagcagcccccacaagtttgggatctaatacaatggcttcaggcggtggcgcaccaatggcagacaataacgagggtgccgatggagtgggtaattcctcaggaaattggcattgcgattcccaatggctgggcgacagagtcatcaccaccagcaccagaacctgggccctgcccacttacaacaaccatctctacaagcaaatctccagccaatcaggagcttcaaacgacaaccactactttggctacagcaccccttgggggtattttgactttaacagattccactgccacttctcaccacgtgactggcagcgactcattaacaacaactggggattccggcccaagaaactcagcttcaagctcttcaacatccaagttaaagaggtcacgcagaacgatggcacgacgactgttgccaataaccttaccagcacggttcaagtgtttacggactcggagtatcaactcccgtacgtgctcgggtcggcgcaccaaggctgtctcccgccgtttccagcggacgtcttcatggtccctcagtatggatacctcaccctgaacaacggaagtcaagcggtgggacgctcatccttttactgcctggagtacttcccttcgcagatgctaaggactggaaataacttccaattcagctataccttcgaggatgtaccttttcacagcagctacgctcacagccagagtttggatcgcttgatgaatcctcttattgatcagtatctgtactacctgaacagaacgcaaggaacaacctctggaacaaccaaccaatcacggctgctttttagccaggctgggcctcagtctatgtctttgcaggccagaaattggctacctgggccctgctaccggcaacagagactttcaaagactgctaacgacaacaacaacagtaactttccttggacagcggccagcaaatatcatctcaatggccgcgactcgctggtgaatccaggaccagctatggccagtcacaaggacgatgaagaaaaatttttccctatgcacggcaatctaatatttggcaaagaagggacaacggcaagtaacgcagaattagataatgtaatgattacggatgaagaagagattcgtaccaccaatcctgtggcaacagagcagtatggaactgtggcaaataacttgcagagctcaaatacagctcccacgactagaactgtcaatgatcagggggccttacctggcatggtgtggcaagatcgtgacgtgtaccttcaaggacctatctgggcaaagattcctcacacggatggacactttcatccttctcctctgatgggaggctttggactgaaacatccgcctcctcaaatcatgatcaaaaatactccggtaccggcaaatcctccgacgactttcagcccggccaagtttgcttcatttatcactcagtactccactggacaggtcagcgtggaaattgagtgggagctacagaaagaaaacagcaaacgttggaatccagagattcagtacacttccaactacaacaagtctgttaatgtggactttactgtagacactaatggtgtttatagtgaacctcgccctattggaacccggtatctcacacgaaacttgtaa

SEQ ID NO: 1138 - DNA, 2211 bp, synthetic construct
  source 1..2211: mol_type = other DNA; note = Description of Artificial Sequence: Synthetic polynucleotide
atggctgctgacggttatcttccagattggctcgaggacaacctttctgaaggcattcgtgagtggtgggctctgaaacctggagtccctcaacccaaagcgaaccaacaacaccaggacaaccgtcggggtcttgtgcttccgggttacaaatacctcggacccggtaacggactcgacaaaggagagccggtcaacgaggcggacgcggcagccctcgaacacgacaaagcttacgaccagcagctcaaggccggtgacaacccgtacctcaagtacaaccacgccgacgccgagtttcaggagcgtcttcaagaagatacgtcttttgggggcaaccttggcagagcagtcttccaggccaaaaagaggatccttgagcctcttggtctggttgaggaagcagctaaaacggctcctggaaagaagaggcctgtagatcagtctcctcaggaaccggactcatcatctggtgttggcaaatcgggcaaacagcctgccagaaaaagactaaatttcggtcagactggcgactcagagtcagtcccagaccctcaacctctcggagaaccaccagcagcccccacaagtttgggatctaatacaatggcttcaggcggtggcgcaccaatggcagacaataacgagggtgccgatggagtgggtaattcctcaggaaattggcattgcgattcccaatggctgggcgacagagtcatcaccaccagcaccagaacctgggccctgcccacttacaacaaccatctctacaagcaaatctccggccaatcaggagcttcaaacgacaaccactactttggctacagcaccccttgggggtattttgactttaacagattccactgccacttctcaccacgtgactggcagcgactcattaacaacaactggggattccggcccaagaaactcagcttcaagctcttcaacatccaagttaaagaggtcacgcagaacgatggcacgacgactattgccaataaccttaccagcacggttcaagtgtttacggactcggagtatcagctcccgtacgtgctcgggtcggcgcaccaaggctgtctcccgccgtttccagcggacgtcttcatggtccctcagtatggatacctcaccctgaacaacggaagtcaagcggtgggacgctcatccttttactgcctggagtacttcccttcgcagatgctaaggactggaaataacttccaattcagctataccttcgaggatgtaccttttcacagcagctacgctcacagccagagtttggatcgcttgatgaatcctcttattgatcagtatctgtactacctgaacagaacgcaaggaacaacctctggaacaaccaaccaatcacggctgctttttagccaggctgggcctcagtctatgtctttgcaggccagaaattggctacctgggccctgctaccggcaacagagactttcaaagactgctaacggcaacaacaacagtaactttccttggacagcggccagcaaatatcatctcaatggccgcgactcgctggtgaatccaggaccagctatggccagtcacaaggacgatgaagaaaaatttttccctatgcacggcaatctaatatttggcaaagaagggacaacggcaagtaacgcagaattagataatgtaatgattacggatgaagaagagattcgtaccaccaatcctgtggcaacagagcagtgtggaactgtggcaaataacttgcagagctcaaatacagctcccacgactagaactgtcaatgatcagggggccttacctggcatggtgtggcaagatcgtgacgtgtaccttcaaggacctatctgggcaaagattcctcacacggatggacactttcatccttctcctctgatgggaggctttggactgaaacatccgcctcctcaaatcatgatcaaaaatactccggtaccggcaaatcctccgacgactttcagcccggccaagtttgcttcatttatcactcagtactccactggacaggtcagcgtggaaattgagtgggagctacagaaagaaaacagcaaacgttggaatccagagattcagtacacttccaactacaacaagtctgttaatgtggactttactgtagacactaatggtgtttatagtgaacctcgccctattggaacccggtatctcacacgaaacttgtaa

SEQ ID NO: 1139 - DNA, 2212 bp, synthetic construct
  source 1..2212: mol_type = other DNA; note = Description of Artificial Sequence: Synthetic polynucleotide
  misc_difference 1283: note = modified_base - a, c, t, g, unknown or other
atggctgctgacggttatcttccagattggctcgaggacaacctttctgaaggcattcgtgagtggtgggctctgaaacctggagtccctcaacccaaagcgaaccaacaacaccaggacaaccgtcggggtcttgtgcttccgggttacaaatacctcggaccgggtaacggactcgacaaaggagagccggtcaacgaggcggacgcggcagccctcgaacacgacaaagcttacgaccagcagctcaaggccggtgacaacccgtacctcaagtacaaccacgccgacgccgagtttcaggagcgtcttcaagaagatacgtcttttgggggcaaccttggcagagcagtcttccaggccaaaaagaggatccttgagcctcttggtctggttgagggagcagctaaaacggctcctggaaagaagaggcctgtagatcagtctcctcaggaaccggactcatcatctggtgttggcaaatcgggcaaacagcctgccagaaaaagactaaatttcggtcagactggcgactcagagtcagtcccagaccctcaacctctcggagaaccaccagcagcccccacaagtttgggatctaatacaatggcttcaggcggtggcgcaccaatggcagacaataacgagggtgccgatggagtgggtaattcctcaggaaattggcattgcgattcccaatggctgggcgacagagtcatcaccaccagcaccagaacctgggccctgcccacttacaacagccatctctacaagcaaatctccagccaatcaggagcttcaaacgacaaccactactttggctacagcaccccttgggggtattttgactttaacagattccactgccacttctcaccacgtgactggcagcgactcattaacaacaactggggattccggcccaagaaactcagcttcaagctcttcaacatccaagttaaagaggtcacgcagaacgatggcacgacgactattgccaataaccttaccagcacggtccaagtgtttacggactcggagtatcagctcccgtacgtgctcgggtcggcgcaccaaggctgtctcccgccgtttccagcggacgccttcatggtccctcagtatggatacctcaccctgaacaacggaagtcaagcggtgggacgctcatccttttactgcctggagtacttcccttcgcagatgctaaggactggaaataacttccaattcagctataccttcgaggatgtaccttttcacggcagctacgctcacagccngagtttggatcgcttgatgaatcctcttattgatcagtatctgtactacctgaacagaacgcaaggaacaacctctggaacaaccaaccaatcacggctgctttttagccaggctgggcctcagtctatgtctttgcaggccagaaattggctacctgggccctgctaccggcaacagagacttttcaaagactgctaacgacaacaacaacagtaactttccttggacagcggccagcaaatatcatctcaatggccgcgactcgctggtgaatccaggaccagctatggccagtcacaaggacgatgaagaaaaatttttccctatgcacggcaatctaatatttggcaaagaagggacaacggcaagtaacgcagaattagataatgtaatgattacggatgaagaagagattcgtaccaccaatcctgtggcaacagagcagtatggaactgtggcaaataacttgcagagctcaaatacagctcccacgactagaactgtcaatgatcagggggccttacctggcatggtgtggcaagatcgtgacgtgtaccttcaaggacctatctgggcaaagattcctcacacggatggacactttcatccttctcctctgatgggaggctttggactgaaacatccgcctcctcaaatcatgatcaaaaatactccggtaccggcaaatcctccgacgactttcagcccggccaagtttgcttcatttatcactcagtactccactggacaggtcagcgtggaaattgagtgggagctacagaaagaaaacagcaaacgttggaatccagagattcagtacacttccaactacaacaagtctgttaatgtggactttactgtagacactaatggtgtttatagtgaacctcgccctattggaacccggtatctcacacgaaactcgtaa

SEQ ID NO: 1140 - DNA, 2212 bp, synthetic construct
  source 1..2212: mol_type = other DNA; note = Description of Artificial Sequence: Synthetic polynucleotide
atggctgctgacggttatcttccagattggctcgaggacaacctttctgaaggcattcgtgagtggtgggctctgaaacctggagtccctcaacccaaagcgaaccaacaacaccaggacaaccgtcggggtcttgtgcttccgggttacaaatacctcggacccggtaacggactcgacaaaggagagccggtcaacgaggcggacgcggcagccctcgaacacgacaaagcttacgaccagcagctcaaggccggtgacaacccgtacctcaagtacaaccacgccgacgccgagtttcaggagcgtcttcaagaagatacgtcttttgggggcaaccttggcagagcagtcttccaggccaaaaagaggatccttgagcctcttggtctggttgagggagcagctaaaacggctcctggaaagaagaggcctgtagatcagtctcctcaggaaccggactcatcatctggtgttggcaaatcgggcaaacagcttgccagaaaaagactaaatttcggtcagactggcgactcagagtcagtcccagaccctcaacctctcggagaaccaccagcagcccccacaagtttgggatctaatacaatggcttcaggcggtggcgcaccaatggcagacaataacgagggtgccgatggagtgggtaattcctcaggaaattggcattgcgattcccaatggctgggcgacagagtcatcaccaccagcaccagaacctgggccctgcccacttacaacagccatctctacaagcaaatctccggccaatcaggagcttcaaacgacaaccactactttggctacagcaccccctgggggtattttgactttaacagattccactgccacttctcaccacgtgactggcagcgactcattaacaacaactggggattccggcccaagaaactcagcttcaagctcttcaacatccaagttaaagaggtcacgcagaacgatggcacgacgactattgccaataaccttaccagcacggttcaagtgtttacggactcggagtatcagctcccgtacgtgctcgggtcggcgcaccaaggctgtctcccgccgtttccagcggacgtcttcatggtccctcagtatggatacctcaccctgaacaacggaagtcaagcggtgggacgctcatccttttactgcctggagtacttcccttcgcagatgctaaggactggaaataacttccaattcagctataccttcgaggatgtaccttttcacagcagctacgctcacagccagagtttggatcgcttgatgaatcctcttattgatcagtatctgtactacctgaacagaacgcaaggaacaacctctggaacaaccaaccaatcacggctgctttttagccaggctgggcctcagtctatgtctttgcaggccagaaattggctacctgggccctgctaccggcaacagagactttcaaagactgctaacgacaacaacaacagtaactttccttggacagcggccagcaaatatcatctcaatggccgcgactcgctggtgaatcccaggaccagctatggccagtcacaaggacgatgaagaaaaatttttccctatgcacggcaatctaatatttggcaaagaagggacaacggcaagtaacgcagaattagataatgtaatgattacggatgaagaagagattcgtaccaccaatcctgtggcaacagagcagtatggaactgtggcaaataacttgcagagctcaaatacagctcccacgactagaactgtcaatgatcagggggccttacctggcatggtgtggcaagatcgtgacgtgtaccttcaaggacctatctgggcaaagattcctcacacggatggacactttcatccttctcctctgatgggaggctttggactgaaacatccgcctcctcaaatcatgatcaaaaatactccggtaccggcaaatcctccgacgactttcagcccggccaagtttgcttcatttatcactcagtactccactggacaggtcagcgtggaaattgagtgggagctacagaaagaaaacagcaaacgttggaatccagagattcagtacacttccaactacaacaagtctgttaatgtggactttactgtagacactaatggtgtttatagtgaacctcgccctattggaacccggtatctcacacgaaacttgtaa

SEQ ID NO: 1141 - DNA, 2212 bp, synthetic construct
  source 1..2212: mol_type = other DNA; note = Description of Artificial Sequence: Synthetic polynucleotide
atggctgctgacggttatcttccagattggctcgaggacaacctttctgaaggcattcgtgagtggtgggctctgaaacctggagtccctcaacccaaagcgaaccaacaacaccaggacgaccgtcggggtcttgtgcttccgggttacaaatacctcggacccggtaacggactcgacaaaggagagccggtcaacgaggcggacgcggcagccctcgaacacgacaaagcttacgaccagcagctcaaggccggtgacaacccgtgcctcaagtacaaccacgccgacgccgagtttcaggagcgtcttcaagaagatacgtcttttgggggcaaccttggcagagcagtcttccaggccaaaaagaggatccttgagcctcttggtctggttgaggaagcagctaaaacggctcctggaaagaagaggcctgtagatcagtctcctcaggaaccggactcatcatctggtgttggcaaatcgggcaaacagcctgccagaaaaagactaaatttcggtcagactggcgactcagagtcagtcccagaccctcaacctctcggagaaccaccagcagcccccacaagtttgggatctaatacaatggcttcaggcggtagcgcaccaatggcagacaataacgagggtgccgatggagtgggtaattcctcaggaaattggcattgcgattcccaatggctgggcgacagagtcatcaccaccagcaccagaacctgggccctgcccacttacaacaaccatctctacaagcaaatctccagccaatcaggagcttcaaacgacaaccactactttggctacagcaccccttgggggtattttgactttaacagattccactgccacttctcaccacgtgactggcagcgactcattaacaacaactggggattccggcccaagaaactcagcttcaagctcttcaacatccaagttaaagaggtcacgcagaacgatggcacgacgactattgccaataaccttaccagcacggttcaagtgtttacggactcggagtatcagctcccgtacgtgctcgggtcggcgcaccaaggctgtctcccgccgtttccagcggacgtcttcatggtccctcagtatggatacctcaccctgaacaacggaagtcaagcggtgggacgctcatccttttactgcctggagtacttcccttcgcagatgctaaggactggaaataacttccaattcagctataccttcgaggatgtaccttttcacagcagctacgctcacagccagagtttggatcgcttgatggatcctcttattgatcagtatctgtactacctgaacagaacgcaaggaacaacctctggaacaaccaaccaatcacggctgctttttagccaggctgggcctcagtctatgtctttgcaggccagaaattggctacctgggccctgctaccggcaacagagactttcaaagactgctaacgacaacaacaacagtaactttccttggacagcggccagcaaatatcatctcaatggccgcgactcgctggtgaatccaggaccagctatggccagtcacaaaggacgatgaagaaaaatttttccctatgcacggcaatctaatatttggcaaagaagggacaacggcaagtaacgcagaattagataatgtaatgattacggatgaagaagagattcgtaccaccaatcctgtggcaacagagcagtatggaactgtggcaaataacttgcagagctcaaatacagctcccacgactagaactgtcaatgatcagggggccttacctggcatggtgtggcaagatcgtgacgtgtaccttcaaggacctatctgggcaaagattcctcacacggatggacactttcatccttctcctctgatgggaggctttggactgaaacatccgcctcctcaaatcatgatcaaaaatactccggtaccggcaaatcctccgacgactttcagcccggccaagtttgcttcatttatcactcagtactccactggacaggtcagcgtggaaattgagtgggagctacagaaagaaaacagcaaacgttggaatccagagattcagtacacttccaactacaacaagtctgttaatgtggactttactgtagacactaatggtgtttatagtgaacctcgccctattggaacccggtatctcacacgaaacctgtaa

SEQ ID NO: 1142 - DNA, 2211 bp, synthetic construct
  source 1..2211: mol_type = other DNA; note = Description of Artificial Sequence: Synthetic polynucleotide
atggctgctgacggttatcttccagattggctcgaggacaacctttctgaaggcattcgtgagtggtgggctctgaaacctggagtccctcaacccaaagcgaaccaacaacaccaggacgaccgtcggggtcttgtgcttccgggttacaaatacctcggacccggtaacggactcgacaaaggagagccggtcaacgaggcggacgcggcagccctcgaacacgacaaagcttacgaccagcagctcaaggccggtgacaacccgtacctcaagtacaaccacgccgacgccgagtttcaggagcgtcttcaagaagatacgtcttttgggggcaaccttggcagagcagtcttccaggccaaaaagaggatccttgagcctcttggtctggttgaggaagcagctaaaacggctcctggaaagaagaggcctgtagatcagtctcctcaggaaccggactcatcatctggtgttggcaaatcgggcaaacagcctgccagaaaaagactaaatttcggtcagactggcgactcagagtcagtcccagaccctcaacctctcggagaaccaccagcagcccccacaagtttgggatctaatacaatggcttcaggcggtggcgcaccaatggcagacaataacgagggtgccgatggagtgggtaattcctcaggaaattggcattgcgattcccaatggctgggcaacagagtcatcaccaccagcaccagaacctgggccctgcccacttacaacaaccatctctacaagcaaatctccagccaatcaggagcttcaaacgacaaccactactttggctacagcaccccttgggggtattttgactttaacagattccactgccacttctcaccacgtgactggcagcgactcattaacaacaactggggattccggcccaagaaactcagcttcaagctcttcaacatccaagttaaagaggtcacgcagaacgatggcacgacgactattgccaataaccttaccagcacggttcaagtgtttacggactcggagtatcagctcccgtacgtgctcgggtcggcgcaccaaggctgtctcccgccgtttccagcggacgtcttcatggtccctcagtatggatacctcaccctgaacaacggaagtcaagcggtgggacgctcatccttttactgcctggagtacttcccttcgcagatgctaaggactggaaataacttccaattcagctataccttcgaggatgtaccttttcacagcagctacgctcacagccagagtttggatcgcttgatgaatcctcttattgatcagtatctgtactacctgaacagaacgcaaggaacaacctctggaacaaccaaccaatcacggctgctttttagccaggctgggcctcagtctatgtctttgcaggccagaaattggctacctgggccctgctaccggcaacagagactttcaaagactgctaacgacaacaacaacagtaactttccttggacagcggccagcaaatatcatctcaatggccgcgactcgctggtgaatccaggaccagctatggccagtcacaaggacgatgaagaaaaatttttccctatgcacggcaatctaatatttggcaaagaagggacaacggcaagtaacgcagaattagataatgtaatgattacggatgaagaagagattcgtaccaccaatcctgtggcaacagagcagtatggaactgtggcaaataacttgcagagctcaaatacagctcccacgactagaactgtcaatgatcagggggccttacctggcatggtgtggcaagatcgtgacgtgtaccttcaaggacctatctgggcaaagattcctcacacggatggacactttcatccttctcctctgatgggaggctttggactgaaacatccgcctcctcaaatcatgatcaaaaatactccggtaccggcaaatcctccgacgactttcagcccggccaagtttgcttcatttatcactcagtactccactggacaggtcagcgtggaaattgagtgggagctacagaaagaaaacagcaaacgttggaatccagagattcagtacacttccaactacaacaagtctgttaatgtggactttactgtagacactaatggtgtttatagtgaacctcgccctattggaacccggtatctcacacgaaacttgtaa

SEQ ID NO: 1143 - DNA, 2211 bp, synthetic construct
  source 1..2211: mol_type = other DNA; note = Description of Artificial Sequence: Synthetic polynucleotide
atggctgctgacggttatcttccagattggctcgaggacaacctttctgaaggcattcgtgagtggtgggctctgaaacctggagtccctcaacccaaagcgaaccaacaacaccaggacgaccgtcggggtcttgtgcttccgggttacaaatacctcggacccggtaacggactcgacaaaggagagccggtcaacgaggcggacgcggcagccctcgaacacgacaaagcttacgaccagcagctcaaggccggtgacaacccgtacctcaagtacaaccacgccgacgccgagtttcaggagcgtcttcaagaagatacgtcttttgggggcaaccttggcagagcagtcttccaggccaaaaagaggatccttgagcctcttggtctggttgaggaagcagctaaaacggctcctggaaagaagaggcctgtagatcagtctcctcaggaaccggactcatcatctggtgttggcaaatcgggcaaacagcctgccagaaaaagactaaatttcggtcagactggcgactcagagtcagtcccagaccctcaacctctcggagaaccaccagcagcccccacaagtttgggatctaatacaatggcttcaggcggtggcgcaccaatggcggacaataacgagggtgccgatggagtgggtaattcctcaggaaattggcattgcgattcccaatggctgggcgacagagtcatcaccaccagcaccagaacctgggccctgcccacttacaacaaccatctctacaagcaaatctccagccaatcaggagcttcaaacgacaaccactactttggctacagcaccccttgggggtattttgactttaacagattccactgccacttctcaccacgtgactggcagcgactcattaacaacaactggggattccggcccaagaaactcagcttcaagctcttcaacatccaagttaaagaggtcacgcagaacgatggcacgacgactattgccaataaccttaccagcacggttcaagtgtttacggactcggagtatcagctcccgtacgtgctcgggtcggcgcaccaaggctgtctcccgccgtttccagcggacgtcttcatggtccctcagtatggatacctcaccctgaacaacggaagtcaagcggtgggacgctcatccttttactgcctggagtacttcccttcgcagatgctaaggactggaaataacttccaattcagctataccttcgaggatgtaccttttcacagcagctacgctcacagccagagtttggatcgcttgatgaatcctcttattgatcagtatctgtactacctgaacagaacgcaaggaacaacctctggaacaaccaaccaatcacggctgctttttagccaggctgggcctcagtctatgtctttgcaggccagaaattggctacctgggccctgctaccggcaacagagactttcaaagactgctaacgacaacaacaacagtaactttccttggacagcggccagcaaatatcatctcaatggccgcgactcgctggtgaatccaggaccagctatggccagtcacaaggacgatgaagaaaaatttttccctatgcacggcaatctaatatttggcaaagaagggacaacggcaagtaacgcagaattagataatgtaatgattacggatgaagaagagattcgtaccaccaatcctgtggcaacagtgcagtatggaactgtggcaaataacttgcagagctcaaatacagctcccacgactagaactgtcaatgatcagggggccttacctggcatggtgtggcaagatcgtgacgtgtaccttcaaggacctatctgggcaaagattcctcacacggatggacactttcatccttctcctctgatgggaggctttggactgaaacatccgcctcctcaaatcatgatcaaaaatactccggtaccggcaaatcctccgacgactttcagcccggccaagtttgcttcatttatcactcagtactccactggacaggtcagcgtggaaattgagtgggagctacagaaagaaaacagcaaacgttggaatccagagattcagtacacttccaactacaacaagtctgttaatgtggactttactgtagacactaatggtgtttatagtgaacctcgccctattggaacccggtatctcacacgaaacttgtaa

SEQ ID NO: 1144 - DNA, 2211 bp, synthetic construct
  source 1..2211: mol_type = other DNA; note = Description of Artificial Sequence: Synthetic polynucleotide
atggctgctgacggttatcttccagattggctcgaggacaacctttctgaaggcattcgtgagtggtgggctctgaaacctggagtccctcaacccaaagcgaaccaacaacaccaggacaaccgtcggggtcttgtgcttccgggttacaaatacctcggacccggtaacggactcgacaaaggagagccggtcaacgaggcggacgcggcagccctcgaacacgacaaagcttacgaccagcagctcaaggccggtgacaacccgtacctcaagtacaaccacgccgacgccgagtttcaggagcgtcttcaagaagatacgtcttttgggggcaaccttggcagagcagtcttccaggccaaaaaggggatccttgagcctcttggtctggttgaggaagcagctaaaacggctcctggaaagaagaggcctgtagatcagtctcctcaggaaccggactcatcatctggtgttggcaaatcgggcaaacagcctgccagaaaaagactaaatttcggtcagactggcgactcagagtcagtcccagaccctcaacctctcggagaaccaccagcagcccccacaagtttgggatctaatacaatggcttcaggcggtggcgcaccaatggcagacaataacgagggtgccgatggagtgggtaattcctcaggaaattggcattgcgattcccaatggctgggcgacagagtcatcaccaccagcaccagaacctgggccctgcccacttacaacaaccatctctacaagcaaatctccagccaatcaggagcttcaaacgacaaccactactttggctacagcaccccttgggggtattttgactttaacagattccactgccacttctcaccacgtgactggcagcgactcattaacaacaactggggattccggcccaagaaactcagcttcaagctcttcaacatccaagttaaagaggtcacgcagaacgatggcacgacgactattgccaataaccttaccagcacggttcaagtgtttacggactcggagtatcagctcccgtacgtgttcgggtcggcgcaccaaggctgtctcccgccgtttccagcggacgtcttcatggtccctcagtatggatacctcaccctgaacaacggaagtcaagcggtgggacgctcatccttttactgcctggagtacttcccttcgcagatgctaaggactggaaataacttccaattcagctataccttcgaggatgtaccttttcacagcagctacgctcacagccagagttcggatcgcttgatgaatcctcttattgatcagtatctgtactacctgaacagaacgcaaggaacaacctctggaacaaccaaccaatcacggctgctttttagccaggctgggcctcagtctatgtctttgcaggccagaaattggctacctgggccctgctaccggcaacagagactttcaaagactgctaacgacaacaacaacagtaactttccttgaacagcggccagcaaatatcatctcaatggccgcgactcgctggtgaatccaggaccagctatggccagtcacaaggacgatgaagaaaaatttttccctatgcacggcaatctaatatttggcaaagaagggacaacggcaagtaacgcagaattagataatgtaatgattacggatgaagaagagattcgtaccaccaatcctgtggcaacagagcagtatggaactgtggcaaataacttgcagagctcaaatacagctcccacgactagaactgtcaatgatcagggggccttacctggcatggtgtggcaagatcgtgacgtgtaccttcaaggacctatctgggcaaagattcctcacacggatggacactttcatccttctcctctgatgggaggctttggactgaaacatccgcctcctcaaatcatgatcaaaaatactccggtaccggcaaatcctccgacgactttcagcccggccaagtttgcttcatttatcactcagtactccactggacaggtcagcgtggaaattgagtgggagctacagaaagaaaacagcaaacgttggaatccagagattcagtacacttccaactacaacaagtctgttaatgtggactttactgtagacactaatggtgtttatagtgaacctcgccctattggaacccggtatctcacacgaaacttgtaa

SEQ ID NO: 1145 - DNA, 2211 bp, synthetic construct
  source 1..2211: mol_type = other DNA; note = Description of Artificial Sequence: Synthetic polynucleotide
atggctgctgacggttatcttccagattggctcgaggacaacctttctgaaggcattcgtgagtggtgggctctgaaacctggagtccctcaacccaaagcgaaccaacaacaccaggacaaccgtcggggtcttgtgcttccgggttacaaatacctcggacccggtaacggactcgacgaaggagagccggtcaacgaggcggacgcggcagccctcgaacacgacaaagcttacgaccagcagctcaaggccggtgacaacccgtacctcaagtacaaccacgccgacgccgagtttcaggagcgtcttcaagaagatacgtcttttgggggcaaccttggcagagcagtcttccaggccaaaaagaggatccttgagcctcttggtctggttgagggagcagctaaaacggctcctggaaagaagaggcctgtagatcagtctcctcaggaaccggactcatcatctggtgttggcaaatcgggcaaacagcctgccagaaaaagactaaatttcggtcagactggcgactcagagtcagtcccagaccctcaacctctcggagaaccaccagcagcccccacaagtttgggatctaatacaatggcttcaggcggtggcgcaccaatggcagacaataacgagggtgccgatggagtgggtaattcctcaggaaattggcattgcgattcccaatggctgggcgacagagtcatcaccaccagcaccagaacctgggccctgcccacttacaacagccacctctacaagcaaatctccagccaatcaggagcttcaaacgacaaccactactttggctacagcaccccttgggggtattttgactttaacagattccactgccacttctcaccacgtgactggcagcgactcattaacaacaactggggattccggcccaagaaactcagcttcaagctcttcaacatccaagttaaagaggtcacgcagaacgatggcacgacgactattgccaataaccttaccagcacggttcaagtgtttacggactcggagtatcagctcccgtacgtgctcgggtcggcgcaccaaggctgtctcccgccgtttccagcggacgtcttcatggtccctcagtatggatacctcaccctgaacaacggaagtcaagcggtgggacgctcatccttttactgcctggagtacttcccttcgcagatgctaaggactggaaataacttccaattcagctataccttcgaggatgtaccttttcacagcagctacgctcacagccagagtttggatcgcttgatgaatcctcttattgatcagtatctgtactacctgaacagaacgcaaggaacaacctctggaacaaccaaccaatcacggctgctttttagccaggctgggcctcagtctatgtctttgcaggccagaaattggctacctgggccctgctaccggcaacagagactttcaaagactgctaacgacaacaacaacagtaactttccttggacagcggccagcaaatatcatctcaatggccgcgactcgctggtgaatccaggaccagctatggccagtcacaaggacgatgaagaaaaatttttccctatgcacggcaatctaatatttggcaaagaagggacaacggcaagtaacgcagaattagataatgtaatgattacggatgaagaagagattcgtaccaccaatcctgtggcaacagagcagtatggaactgtggcaaataacttgcagagctcaaatacagctcccacgactagaactgtcaatgatcagggggccttacctggcatggtgtggcaagatcgtgacgtgtaccttcaaggacctatctgggcaaagattcctcacacggatggacactttcatccttctcctctgatgggaggctttggactgaaacatccgcctcctcaaatcatgatcaaaaatactccggtaccggcaaatcctccgacgactttcagcccggccaagtttgcttcatttatcactcagtactccactggacaggtcagcgtggaaattgagtgggagctacagaaagaaaacagcaaacgttggaatccagagattcagtacacttccaactacaacaagtctgttaatgtggactttactgtagacactaatggtgtttatagtgaacctcgccctattggaacccggtatctcacacgaaacttgtaa

SEQ ID NO: 1146 - DNA, 2211 bp, synthetic construct
  source 1..2211: mol_type = other DNA; note = Description of Artificial Sequence: Synthetic polynucleotide
atggctgctgacggttatcttccagattggctcgaggacaacctttctgaaggcattcgtgagtggtgggctctgaaacctggagtccctcaacccaaagcgaaccaacaacaccaggacaaccgtcggggtcttgtgcttccgggttacaaatacctcggacccggtaacggactcgacaaaggagagccggtcaacgaggcggacgcggcagccctcgaacacgacaaagcttacgaccagcagctcaaggccggtgacaacccgtacctcaagtacaaccacgccgacgccgagtttcaggagcgtcttcaagaagatacgtcttttgggggcaaccttggcagagcagtcttccaggccaaaaagaggatccttgagcctcttggtctggttgagggagcagctaaaacggctcctggaaagaagaggcctgtagatcagtctcctcaggaaccggactcatcatctggtgttggcaaatcgggcaaacagcctgccagaaaaagactaaatttcggtcagactggcgactcagagtcagtcccagaccctcaacctctcggagaaccaccagcagcccccacaagtttgggatctaatacaatggcttcaggcggtggcgcaccaatggcagacaataacgagggtgccgatggagtgggtaattcctcaggaaattggcattgcgattcccaatggctgggcgacagagtcatcaccaccagcaccagaacctgggccctgcccacttacaacagccatctctacaagcaaatctccagccaatcaggagcttcaaacgacaaccactactttggctacagcaccccttggggtattttgactttaacagattccactgccacttctcaccacgtgactggcagcgactcattaacaacaactggggattccggcccaagaaactcagcttcaagctcttcaacatccaagttaaagaggtcacgcagaacgatggcacgacgactattgccaataaccttaccagcacggttcaagtgtttacggactcggagtatcagctcccgtacgtgctcgggtcggcgcaccaaggctgtctcccgccgtttccagcggacgccttcatggtccctcagtatggatacctcaccctgaacaacggaagtcaagcggtgggacgctcatccttttactgcctggagtacttcccttcgcagatgctaaggactggaaataacttccaattcagctataccctcgaggatgtaccttttcacagcagctacgctcacagccagagtttggatcgcttgatgaatcctcttattgatcagtatctgtactacctgaacagaacgcaaggaacaacctctggaacaaccaaccaatcacggctgctttttagccaggctgggcctcagtctatgtctttgcaggccagaaattggctacctgggccctgctaccggcaacagagactttcaaagactgctaacgacaacaacaacagtaactttccttggacagcggccagcaaatatcatctcaatggccgcgactcgctggtgaatccaggaccagctatggccagtcacaaaggacgatgaagaaaaatttttccctatgcacggcaatctaatatttggcaaagaagggacaacggcaagtaacgcagaattagatagtgtaatgattacggatgaagaagagattcgtaccaccaatcctgtggcaacagagcagtatggaactgtggcaaataacttgcagagctcaaatacagctcccacgactagaactgtcaatgatcagggggccttacctggcatggtgtggcaagatcgtgacgtgtaccttcaaggacctatctgggcaaagattcctcacacggatggacactttcatccttctcctctgatgggaggctttggactgaaacatccgcctcctcaaatcatgatcaaaaatactccggtaccggcaaatcctccgacgactttcagcccggccaagtttgcttcatttatcactcagtactccactggacaggtcagcgtggaaattgagtgggagctacagaaagaaaacagcaaacgttggaatccagagattcagtacacttccaactacaacaagtctgttaatgtggactttactgtagacactaatggtgtttatagtgaacctcgccctattggaacccggtatctcacacgaaacttgtaa

SEQ ID NO: 1147 - DNA, 2205 bp, synthetic construct
  source 1..2205: mol_type = other DNA; note = Description of Artificial Sequence: Synthetic polynucleotide
atgactgacggttaccttccagattggctagaggacaacctctctgagggcgttcgagagtggtgggcgctgcaacctggagcccctaaacccaaggcaaatcaacaacatcaggacaacgctcggggtcttgtgcttccgggttacaaatacctcggacccggcaacggactcgacaagggggaacccgtcaacgcagcggacgcggcagccctcgagcacgacaaggcctacgaccagcagctcaaggccggtgacaacccctacctcaagtacaaccacgccgacgcggagttccagcagcggcttcagggcgacacatcgtttgggggcaacctcggcagagcagtcttccaggccaaaaagagggttcttgaacctcttggtctggttgagcaagcgggtgagacggctcctggaaagaagagaccgttgattgaatccccccagcagcccgactcctccacgggtatcggcaaaaaaggcaagcagccggctaaaaagaagctcgttttcgaagacgaaactggagcaggcgacggaccccctgagggatcaacttccggagccatgtctgatgacagtgagatgcgtgcagcaactggcggagctgcagtcgagggcggacaaggtgccgatggagtgggtaatgcctcgggtgattggcattgcgattccacctggtctgagggccacgtcacgaccaccagcaccagaacctgggtcttgcccacctacaacaaccacctctacaagcgactcggagagagcctgcagtccaacacctacaacggattctccaccccctggggatactttgacttcaaccgcttccactgccacttctcaccacgtgactggcagcgactcatcaacaacaactggggcatgcgacccaaagccatgcgggtcaaaatcttcaacatccaggtcaaggaggtcacgacgtcgaacggcgagacaacggtggctaataaccttaccagcacggttcagatctttgcggactcgtcgtacgaactgccgtacgtgatggatgcgggtcaagagggcagcctgcctccttttcccaacgacgtctttatggtgccccagtacggctactgtggactggtgaccggcaacacttcgcagcaacagactgacagaaatgccttctactgcctggagtactttccttcgcagatgctgcggactggcaacaactttgaaattacgtacagttttgagaaggtgcctttccactcgatgtacgcgcacagccagagcctggaccggctgatgaaccctctcatcgaccagtacctgtggggactgcaatcgaccaccaccggaaccaccctgaatgccgggactgccaccaccaactttaccaagctgcggcctaccaacctttccaactttaaaaagaactggctgcccgggccttcaatcaagcagcagggcttctcaaagactgccaatcaaaactacaagatccctgccaccgggtcagacagtctcatcaaatacgagacgcacagcactctggacggaagatggagtgccctgacccccggacctccaatggccacggctggacctgcggacagcaagttcagcaacagccagctcatctttgcggggcctaaacagaacggcaacacggccaccgtacccgggactctgatcttcacctctgaggaggagctggcagccaccaacgctaccgatacggacatgtggggcaacctacctggcggtgaccagagcaacagcaacctgccgaccgtggacagactgacagccttgggagccgtgcctggaatggtctggcaaaacagagacatttactaccagggtcccatttgggccaagattcctcataccgatggacactttcacccctcaccgctgattggtgggtttgggctgaaacacccgcctcctcaaatttttatcaagaacaccccggtacctgcgaatcctgcgacgaccttcagctctactccggtaaactccttcattactcagtacagcactggccaggtgtcggtgcagattgactgggagatccagaaggagcggtccaaacgctggaaccccgaggtccagtttacctccaactacggacagcaaaactctctgttgtgggctcccgatgcggctgggaaatacactgagcctagggctatcggtacccgctacctcacccaccacctgtaa

SEQ ID NO: 1148 - DNA, 2205 bp, synthetic construct
  source 1..2205: mol_type = other DNA; note = Description of Artificial Sequence: Synthetic polynucleotide
atgactgacggttaccttccagattggctagaggacaacctctctgaaggcgttcgagagtggtgggcgctgcaacctggagcccctaaacccaaggcaaatcaacaacatcaggacaacgctcggggtcttgtgcttccgggttacaaatacctcggacccggcaacggactcgacaagggggaacccgtcaacgcagcggacgcggcagccctcgagcacgacaaggcctacgaccagcagctcaaggccggtgacaacccctacctcaagtacaaccacgccgacgcggagttccagcagcggcttcagggcgacacatcgtttgggggcaacctcggcagagcagtcttccaggccaaaaagagggttcttgaacctcttggtctggttgagcaagcgggtgagacggctcctggaaagaagagaccgttgattgaatccccccagcagcccgactcctccacgggtatcggcaaaaaaggcaagcagccggctaaaaagaagctcgttttcgaagacgaaactggagcaggcgacggaccccctgagggatcaacttccggagccatgtctgatgacagtgagatgcgtgcagcagctggcggagctgcagtcgagggcggacaaggtgccgatggagtgggtaatgcctcgggtgattggcattgcgattccacctggtctgagggccacgtcacgaccaccagcaccagaacctgggtcttgcccacctacaacaaccacctctacaagcgactcggagagagcctgcagtccaacacctacaacggattctccaccccctggggatactttgacttcaaccgcttccactgccacttcttaccacgtgactggcagcgactcatcaacaacaactggggcgtgcgacccaaagccatgcgggtcaaaatcttcaacatccaggtcaaggaggtcacgacgtcgaacggcgagacaacggtggctaataaccttaccagcacggttcagatctttgcggactcgtcgtacgaactgccgtacgtgatggatgcgggtcaagagggcagcctgcctccttttcccaacgacgtctttatggtgccccagtacggctactgtggactggtgaccggcgacacttcgcagcaacagactgacagaaatgccttctactgcctggagtactttccttcgcagatgctgcggactggcaacaactttgaaattacgtacagttttgagaaggtgcctttccactcgatgtacgcgcacagccagagcctggaccggctgatgaaccctctcatcgaccagtacctgtggggactgcaatcgaccaccaccggaaccaccctgaatgccgggactgccaccaccaactttaccaagctgcggcctaccaacttttccaactttaaaaagaactggctgcccgggccttcaatcaagcagcagggcttctcaaagactgccaatcaaaactacaagatccctgccaccgggtcagacagtctcatcaaatacgagacgcacagcactctggacggaagatggagtgccctgacccccggacctccaatggccacggctggacctgcggacagcaagttcagcaacagccagctcatctttgcggggcctaaacagaacggcaacacggccaccgtacccgggactctgatcttcacctctgaggaggagctggcagccaccaacgccaccgatacggacatgtggggcaacctacctggcggtgaccagagcaacagcaacctgccgaccgtggacagactgacagccttgggagccgtgcctggaatggtctggcaaaacagagacatttactaccagggtcccatttgggccaagattcctcataccgatggacactttcacccctcaccgctgattggtgggtttgggctgaaacacccgcctcctcaaatttttatcaagaacaccccggtacctgcgaatcctgcgacgaccttcagctctactccggtaaactccttcattactcagtacagcactggccaggtgtcggtgcagattgactgggagatccagaaggagcggtccaaacgctggaaccccgaggtccagtttacctccaactacggacagcaaaactctctgttgtgggctcccgatgcggctgggaaatacactgagcctagggctatcggtacccgctacctcacccaccacctgtaa

SEQ ID NO: 1149 - DNA, 2205 bp, synthetic construct
  source 1..2205: mol_type = other DNA; note = Description of Artificial Sequence: Synthetic polynucleotide
atgactgacggttaccttccagattggctagaggacaacctctctgaaggcgttcgagagtggtgggcgctgcaacctggagcccctaaacccaaggcaaatcaacaacatcaggacaacgctcggggtcttgtgcttccgggttacaaatacctcggacccggcaacggactcgacgagggggaacccgtcaacgcagcggacgcggcagccctcgagcacgacaaggcctacgaccagcagctcaaggccggtgacaacccctacctcaagtacaaccacgccgacgcggagttccagcagcggcttcagggcgacacatcgtttgggggcaacctcggcagagcagtcttccaggccaaaaagagggttcttgaacctcttggtctggttgagcaagcgggtgagacggctcctggaaagaagagaccgttgattgaatccccccagcagcccgactcctccacgggtatcggcaaaaaaggcaagcagccggctaaaaagaagctcgttttcgaagacgaaactggagcaggcgacggaccccctgagggatcaacttccggagccatgtctgatgacagtgagatgcgtgcagcagctggcggagctgcagtcgagggcggacaaggtgccgatggagtgggtaatgcctcgggtgattggcattgcgattccacctggtctgagggccacgtcacgaccaccagcaccagaacctgggtcttgcccacctacaacaaccacctctacaagcgactcggagagagcctgcagtccaacacctacaacggattctccaccccctggggatactttgacttcaaccgcttccactgccacttctcaccacgtgactggcagcgactcatcaacaacaactggggcatgcgacccaaagccatgcgggtcaaaatcttcaacatccaggtcaaggaggtcacgacgtcgaacggcgagacaacggtggctaataaccttaccagcacggttcagatctttgcggactcgtcgtacgaactgccgtacgtgatggatgcgggtcaagagggcagcctgcctccttttcccaacgacgtctttatggtgccccagtacggctactgtggactggtgaccggcaacacttcgcagcaacagactgacagaaatgccttctactgcctggagtactttccttcgcagatgctgcggactggcaacaactttgaaattacgtacagttttgagaaggtgcctttccactcgatgtacgcgcacagccagagcctggaccggctgatgaaccctctcatcgaccagtacctgtggggactgcaatcgaccaccaccggaaccaccctgaatgccgggactgccaccaccaactttaccaagctgcggcctaccaacttttccaactttaaaaagaactggctgcccgggccttcaatcaagcagcagggcttctcaaagactgccaatcaaaactacaagatccctgccaccgggtcagacagtctcatcaaatacgagacgcacagcactctggacggaagatggagtgccctgacccccggacctccaatggccacggctggacctgcggacagcaagttcagcaacagccagctcatctttgcggggcctaaacagaacggcaacacggccaccgtacccgggactctgatcttcacctctgaggaggagctggcagccaccaacgctaccgatacggacatgtggggcaacctacctggcggtgaccagagcaacagcaacctgccgaccgtggacagactgacagccttgggagccgtgcctggaatggtctggcaaaacagagacatttactaccagggtcccatttgggccaagattcctcataccgatggacactttcacccctcaccgctgattggtgggtttgggctgaaacacccgcctcctcaaatttttatcaagaacaccccggtacctgcgaatcctgcgacgaccttcagctctactccggtaaactccttcattactcagtacagcactggccaggtgtcggtgcagattgactgggagatccagaaggagcggtccaaacgctggaaccccgaggtccagtttacctccaactacggacagcaaaactctctgttgtgggctcccgatgcggctgggaaatacactgagcctagggctatcggtacccgctacctcacccaccacctgtaa

SEQ ID NO: 1150 - DNA, 2205 bp, synthetic construct
  source 1..2205: mol_type = other DNA; note = Description of Artificial Sequence: Synthetic polynucleotide
atgactgacggttaccttccagattggctagaggacaacctctctgaaggcgttcgagagtggtgggcgctgcaacctggagcccctaaacccaaggcaaatcaacaacatcaggacaacgctcggggtcttgtgcttccgggttacaaatacctcggacccggcaacggactcgacaagggggaacccgtcaacgcagcggacgcggcagccctcgagcacgacaaggcctacgaccagcagctcaaggccggtgacaacccctacctcaagtacaaccacgccgacgcggagttccagcagcggcttcagggcgacacatcgtttgggggcaacctcggcagagcagtcttccaggccaaaaagagggttcttgaacctcttggtctggttgagcaagcgggtgagacggctcctggaaagaagagaccgttgattgaatccccccagcagcccgactcctccacgggtatcggcaaaaaaggcaagcagccggctaaaaagaagctcgttttcgaagacggaactggagcaggcgacggaccccctgagggatcaacttccggagccatgtctgatgacagtgagatgcgtgcagcagctggcggagctgcagtcgagggcggacaaggtgccgatggagtgggtaatgcctcgggtgattggcattgcgattccacctggtctgagggccacgtcacgaccaccagcaccagaacctgggtcttgcccacctacaacaaccacctctacaagcgactcggagagagcctgcagtccaacacctacaacggattccccaccccctggggatactttgacttcaaccgcttccactgccacttctcaccacgtgactggcagcgactcatcaacaacaactggggcatgcgacccaaagccatgcgggtcaaaatcttcaacatccaggtcaaggaggtcacgacgtcgaacggcgagacaacggcggctaataaccttaccagcacggttcagatctttgcggactcgtcgtacgaactgccgtacgtgatggatgcgggtcaagagggcagcctgcctccttttcccaacgacgtctttatggtgccccagtacggctactgtggactggtgaccggcaacacttcgcagcaacagactgacagaaatgccttctactgcctggagtactttccttcgcagatgctgcggactggcaacaactttgaaattacgtacagttttgagaaggtgcctttccactcgatgtacgcgcacagccagagcctggaccggctgatgaaccctctcatcgaccagtacctgtggggactgcaatcgaccaccaccggaaccaccctgaatgccgggactgccaccaccaactttaccaagctgcggcctaccaacttttccaactttaaaaagaactggctgcccgggccttcaatcaagcagcagggcttctcaaagactgccaatcaaaactacaagatccctgccaccgggtcagacagtctcatcaaatacgagacgcacagcactctggacggaagatggagtgccctgacccccggacctccaatggccacggctggacctgcggacagcaagttcagcaacagccagctcatctttgcggggcctaaacagaacggcaacacggccaccgtacccgggactctgatcttcacctctgaggaggagctggcagccaccaacgccaccgatacggacatgtggggcaacctacctggcggtgaccagagcaacagcaacctgccgaccgtggacagactgacagccttgggagccgtgcctggaatggtctggcaaaacagagacatttactaccagggtcccatttgggccaagattcctcataccgatggacactttcacccctcaccgctgattggtgggtttgggctgaaacacccgcctcctcaaatttttatcaagaacaccccggtacctgcgaatcctgcgacgaccttcagctctactccggtaaactccttcattactcagtacagcactggccaggtgtcggtgcagattgactgggagatccagaaggagcggtccaaacgctggaaccccgaggtccagtttacctccaactacggacagcaaaactctctgttgtgggctcccgatgcggctgggaaatacactgagcctagggctatcggtacccgctacctcacccaccacctgtaa

SEQ ID NO: 1151 - DNA, 2205 bp, synthetic construct
  source 1..2205: mol_type = other DNA; note = Description of Artificial Sequence: Synthetic polynucleotide
atgactgacggttaccttccagattggctagaggacaacctctctgaaggcgttcgagagtggtgggcgctgcaacctggagcccctaaacccaaggcaaatcaacaacatcaggacaacgctcggggtcttgtgcttccgggttacaaatacctcggacccggcaacggactcgacaagggggaacccgtcaacgcagcggacgcggcagccctcgagcacgacaaggcctacgaccagcagctcaaggccggtgacaacccctacctcaagtacaaccacgccgacgcggagttccagcagcggcttcagggcgacacatcgtttgggggcaacctcggcagagcagtcttccaggccaaaaagagggttcttgaacctcttggtctggttgagcaagcgggtgagacggctcctggaaagaagagaccgttgattgaatccccccagcagcccgactcctccacgggtatcggcaaaaaaggcaagcagccggctaaaaagaagctcgttttcgaagacgaaactggagcaggcgacggaccccctgagggatcaacttccggagccatgtctgatgacagtgagatgcgtgcagcagctggcggagctgcagtcgagggcggacaaggtgccgatggagtgggtaatgcctcgggtgattggcattgcgattccacctggtctgagggccacgtcacgaccaccagcaccagaacctgggtcttgcccacctacaacaaccacctctacaagcgactcggagagagcctgcagtccaacacctacaacggattctccaccccctggggatactttgacttcaaccgcttccactgccacttctcaccacgtgactggcagcgactcatcaacaacaactggggcatgcgacccaaagccatgcgggtcaaaatcttcaacatccaggtcaaggaggtcacgacgtcgaacggcgagacaacggtggctaataaccttaccagcacggttcagatctttgcggactcgtcgtacgaactgccgtacgtgatggatgcgggtcaagagggcagcctgcctccttttcccaacgacgtctttatggtgccccagtacggctaccgtggactggtgaccggcaacacttcgcagcaacagactgacagaaatgccttctactgcctggagtactttccttcgcagatgctgcggactggcaacaactttgaaattacgtacagttttgagaaggtgcctttccactcgatgtacgcgcacagccagagcctggaccggctgatgaaccctctcatcgaccagtacctgtggggactgcaatcgaccaccaccggaaccaccctgaatgccgggactgccaccaccaactttaccaagctgcggcctaccaacttttccaactttaaaaagaactggctgcccgggccttcaatcaagcagcagggcttctcaaagactgccaatcaaaactacaagatccctgccaccgggtcagacagtctcatcaaatacgagacgcacagcactctggacggaagatggagtgccctgacccccggacctccaatggccacggctggacctgcggacagcaagttcagcaacagccagctcatctttgcggggcctaaacagaacggcaacacggccaccgtacccgggactctgatcttcacctctgaggaggagctggcagccaccaacgccaccgatacggacatgtggggcaacctacctggcggtgaccagagcaacagcaacctgccgaccgtggacagactgacagccttgggagccgtgcctggaatggtctggcaaaacagagacatttactaccagggtcccatttgggccaagattcctcataccgatggacactttcacccctcaccgctgattggtgggtttgggctgaaacacccgcctcctcaaatttttatcaagaacaccccggtacctgcgaatcctgcgacgaccttcagctctactccggtaaactccttcattactcagtacagcactggccaggtgtcggtgcagattgactgggagatccagaaggagcggtccaaacgctggaaccccgaggtccagtttacctccaactacggacagcaaaactctctgttgtgggctcccgatgcggctgggaaatacactgagcctagggctatcggtacccgctacctcacccaccacctgtaa

SEQ ID NO: 1152 - DNA, 2205 bp, synthetic construct
  source 1..2205: mol_type = other DNA; note = Description of Artificial Sequence: Synthetic polynucleotide
atgactgacggttaccttccagattggctagaggacaacctctctgaaggcgttcgagagtggtgggcgctgcaacctggagcccctaaacccaaggcaaatcaacaacatcaggacaacgctcggggtcttgtgcttcagggttacaaatacctcggacccggcaacggactcgacaagggggaacccgtcaacgcagcggacgcggcagccctcgagcacgacaaggcctacgaccagcagctcaaggccggtgacaacccctacctcaagtacaaccacgccgacgcggagttccagcagcggcttcagggcgacacatcgtttgggggcaacctcggcagagcagtcttccaggccaaaaagagggttcttgaaccccttggtctggttgagcaagcgggtgagacggctcctggaaagaagagaccgttgattgaatccccccagcagcccgactcctccacgggtatcggcaaaaaaggcaagcagccggctaaaaagaagctcgttttcgaagacgaaactggagcaggcgacggaccccctgagggatcaacttccggagccatgtctgatgacagtgagatgcgtgcagcagctggcggagctgcagtcgagggcggacaaggtgccgatggagtgggtaatgcctcgggtgattggcattgcgattccacccggtctgagggccacgtcacgaccaccagcaccagaacctgggtcttgcccacctacaacaaccacctctacaagcgactcggagagagcctgcagtccaacacctacaacggattctccaccccctggggatactttgacttcaaccgcttccactgccacttctcaccacgtgactggcagcgactcatcaacaataactggggcatgcgacccaaagccatgcgggtcaaaatcttcaacatccaggtcaaggaggtcacgacgtcgaacggcgagacaacggtggctaataaccttaccagcacggttcagatctttgcggactcgtcgtacgaactgccgtacgtgatggatgcgggtcaagagggcagcctgcctccttttcccaacgacgtctttatggtgccccagtacggctactgtggactggtgaccggcaacacttcgcagcaacagactgacagaaatgccttctactgcctggagtactttccttcgcagatgctgcggactggcaacaactttgaaattacgtacagttttgagaaggtgcctttccactcgatgtacgcgcacagccagagcctggaccggctgatgaaccctctcatcgaccagtacctgtggggactgcaatcgaccaccaccggaaccaccctgaatgccgggactgccaccaccaactttaccaagctgcggcctaccaacttttccaactttaaaaagaactggctgcccgggccttcaatcaagcagcagggcttctcaaagactgccaatcaaaactacaagatccctgccaccgggtcagacagtctcatcaaatacgagacgcacagcactctggacggaagatggagtgcccggacccccggacctccaatggccacggctggacctgcggacagcaagttcagcaacagccagctcatctttgcggggcctaaacagaacggcaacacggccaccgtacccgggactctgatcttcacctctgaggaggagctggcagccaccaacgccaccgatacggacatgtggggcaacctacctggcggtgaccagagcaacagcaacctgccgaccgtggacagactgacagccttgggagccgtgcctggaatggtctggcaaaacagagacatttactaccagggtcccatttgggccaagattcctcataccgatggacactttcacccctcaccgctgattggtgggtttgggctgaaacacccgcctcctcaaatttttatcaagaacaccccggtacctgcgaatcctgcgacgaccttcagctctactccggtaaactccttcattactcagtacagcactggccaggtgtcggtgcagattgactgggagatccagaaggagcggtccaaacgctggaaccccgaggtccagtttacctccaactacggacagcaaaactctctgttgtgggctcccgatgcggctgggaaatacactgagcctagggctatcggtacccgctacctcacccaccacctgtaa

SEQ ID NO: 1153 - DNA, 2175 bp, synthetic construct
  source 1..2175: mol_type = other DNA; note = Description of Artificial Sequence: Synthetic polynucleotide
atgtcttttgttgatcaccctccagattggttggaagaagttggtgaaggtcttcgcgagtttttgggccttgaagcgggcccaccgaaaccaaaacccaatcagcagcatcaagatcaagcccgtggtcttgtgctgcctggttataactatctcggacccggaaacggtctcgatcgaggagagcctgtcaacagggcagacgaggtcgcgcgagagcacgacatctcgtacaacgagcagcttgaggcgggagacaacccctacctcaagtacaaccacgcggacgccgagtttcaggagaggctcgccgacgacacatccttcgggggaaacctcggaaaggcagtctttcaggccaagaaaagggttctcgaaccttttggcctggttgaagagggtgctaagacggcccctaccggaaagcggatagacgaccactttccaaaaagaaagaaggcccggaccgaagaggactccaagccttccacctcgtcagacgccgaagctggacccagcggatcccagcagctgcaaatcccagcccaaccagcctcaagtttgggagctgatacaatgtctgcgggaggtggcggcccattgggcgacaataaccaaggtgccgatggagtgggcaatgcctcgggagattggcattgcgattccacgtggatgggggacagagtcgtcaccaagtccacccgaacctgggtgctgcccagctacaacaaccaccagtaccgagagatcaaaagcggctccgtcgacggaagcaacgccaacgcctactttggatacagcaccccctgggggtactttgactttaaccgcttccacagccactggagcccccgagactggcaaagactcatcaacaactactggggcttcagaccccggtccctcagagtcaaaatcttcaacattcaagtcaaagaggtcacggtgcaggactccaccaccaccatcgccaacaacctcacctccaccgtccaagtgtttacggacgacgactaccagctgccctacgtcgtcggcaacgggaccgagggatgcctgccggccttccctccgcaggtctttacgctgccgcagtacggttacgcgacgctgaaccgcgacaacacagaaaatcccaccgagaggagcagcttcttctgcctagagtactttcccagcaagatgctgagaacgggcaacaactttgagtttacctacaactttgaggaggtgcccttccactccagcttcgctcccagtcagaacctcttcaagctggccaacccgctggtggaccagtacttgtaccgcttcgtgagcacaaataacactggcggagtccagttcaacaagaacctggccgggagatacgccaacacctacaaaaactggttcccggggcccatgggccgaacccagggctggaacctgggctccggggtcaaccgcgccagtgtcagcgccttcgccacgaccaataggatggagctcgagggcgcgagttaccaggtgcccccgcagccgaacggcatgaccaacaacctccagggcagcaacacctatgccctggagaacactatgatcttcaacagccagccggcgaacccgggcaccaccgccacgtacctcgagggcaacatgctcatcaccagcgagagcgagacgcagccggtgaaccgcgtggcgtacaacgtcggcgggcagatggccaccaacaaccagagctccaccactgcccccgcgaccggcacgtacaacctccaggaaatcgtgcccggcagcgtgtggatggagagggacgtgtacctccaaggacccatctgggccaagatcccagagacggaggcgcactttcacccctctccggccatgggcggattcggactcaaacacccaccgcccatgatgctcatcaagaacacgcctgtgcccggaaatatcaccagcttctcggacgtgcccgtcagcagcttcatcacccagtacagcaccgggcaggtcaccgtggagatggagtgggagctcaagaaggaaaactccaagaggtggaacccagagatccagtacacaaacaactacaacgacccccagtttgtggactttgccccggacagcaccggggaatacagaaccaccagacctatcggaacccgataccttacccgacccctttaa

SEQ ID NO: 1154 - DNA, 2175 bp, synthetic construct
  source 1..2175: mol_type = other DNA; note = Description of Artificial Sequence: Synthetic polynucleotide
atgtcttttgttgatcaccctccagattggttggaagaagttggtgaaggtcttcgcgagtttttgggccttgaagcgggcccaccgaaaccaaaacccaatcagcagcatcaagatcaagcccgtggtcttgtgctgcctggttataactatctcggacccggaaacggtctcgatcgaggagagcctgtcaacagggcagacgaggtcgcgcgagagcacgacatctcgtacaacgagcagcttgaggcgggagacaacccctacctcaagtacaaccacgcggacgccgagtttcaggagaagctcgccgacgacacatcctccgggggaaacctcggaaaggcagtctttcaggccaagaaaagggttctcgaaccttttggcctggttgaagagggtgctaagacggcccctaccggaaagcggatagacgaccactttccaaaaagaaagaaggcccggaccgaagaggactccaagccttccacctcgtcagacgccgaagctggacccagcggatcccagcagctgcaaatcccagcccaaccagcctcaagtttgggagctgatacaatgtctgcgggaggtggcggcccattgggcgacaataaccaaggtgccgatggagtgggcaatgcctcgggagattggcattgcgattccacgtggatgggggacagagtcgtcaccaagtccacccgaacctgggtgctgcccagctacaacaaccaccagtaccgagagatcaaaagcggctccgtcgacggaagcaacgccaacgcctactttggatacagcaccccctgggggtactttgactttaaccgcttccacagccactggagcccccgagactggcaaagactcatcaacaactactggggcttcagaccccggtccctcagagtcaaaatcttcaacattcaagtcaaagaggtcacggtgcaggactccaccaccaccatcgccaacaacctcacctccaccgtccaagtgtttacggacgacgactaccagctgccctacgtcgtcggcaacgggaccgagggatgcctgccggccttccctccgcaggtctttacgctgccgcagtacggttacgcgacgctgaaccgcgacaacacagaaaatcccaccgagaggagcagcttcttctgcctagagtactttcccagcaagatgctgagaacgggcaacaactttgagtttacctacaactttgaggaggtgcccttccactccagcttcgctcccagtcagaacctcttcaagctggccaacccgctagtggaccagtacttgtaccgcttcgtgagcacaaataacactggcggagtccagttcaacaagaacctggccgggagatacgccaacacctacaaaaactggttcccggggcccatgggccgaacccagggctggaacctgggctccggggtcaaccgcgccagtgtcagcgccttcgccacgaccaataggatggagctcgagggcgcgagttaccaggtgcccccgcagccgaacggcatgaccaacaacctccagggcagcaacacctatgccctggagaacactatgatcttcaacagccagccggcgaacccgggcaccaccgccacgtacctcgagggcaacatgctcatcaccagcgagagcgagacgcagccggtgaaccgcgtggcgtacaacgtcggcgggcagatggccaccaacaaccagagctccaccactgcccccgcgaccggcacgtacaacctccaggaaatcgtgcccggcagcgtgtggatggagagggacgtgtacctccaaggacccatctgggccaagatcccagagacgggggcgcactttcacccctctccggccatgggcggattcggactcaaacacccaccgcccatgatgctcatcaagaacacgcctgtgcccggaaatatcaccagcttctcggacgtgcccgtcagcagcttcatcacccagtacagcaccgggcaggtcaccgtggagatggagtgggagctcaagaaggaaaactccaagaggtggaacccagagatccagtacacaaacaactacaacgacccccagtttgtggactttgccccggacagcaccggggaatacagaaccaccagacctatcggaacccgataccttacccgacccctttaa

SEQ ID NO: 1155 - DNA, 2175 bp, synthetic construct
  source 1..2175: mol_type = other DNA; note = Description of Artificial Sequence: Synthetic polynucleotide
atgtcttttgttgatcaccctccagattggttggaagaagttggtgaaggtcttcgcgagtttttgggccttgaagcgggcccaccgaaaccaaaacccaatcagcagcatcaagatcaagcccgtggtcttgtgctgcctggttataactatctcggacccggaaacggtctcgatcgaggagagcctgtcaacagggcagacgaggtcgcgcgagagcacgacatctcgtacaacgagcagcttgaggcgggagacaacccctacctcaagtacaaccacgcggacgccgagtttcaggagaagctcgccgacgacacatccttcgggggaaacctcggaaaggcagtctttcaggccaagaaaagggttctcgaaccttttggcctggttgaagagggtgctaagacggcccctaccggaaagcggatagacgaccactttccaaaaagaaagaaggcccggaccgaagaggactccaagccttccacctcgtcagacgccgaagctggacccagcggatcccagcagctgcaaatcccagcccaaccagcctcaagtttgggagctgatacaatgtctgcgggaggtggcggcccattgggcgacaataaccaaggtgccgatggagtgggcaatgcctcgggagattggcattgcgattccacgtggatgggggacagagtcgtcaccaagtccacccgaacctgggtgctgcccagctacaacaaccaccagtaccgagagatcaaaagcggctccgtcgacggaagcaacgccaacgcctactttggatacagcaccccctgggggtactttgactttaaccgcttccacagccactggagcccccgagactggcaaagactcatcaacaactactggggcttcagaccccggtccctcagagtcaaaatcttcaacattcaagtcaaagaggtcacggtgcaggactccaccaccaccatcgccaacaacctcacctccaccgtccaagtgtttacggacgacgactaccagctgccctacgtcgtcggcaacgggaccgagggatgcctgccggccttccctccgcaggtctttacgctgccgcagtacggttacgcgacactgaaccgcgacaacacagaaaatcccaccgagaggagcagcttcttctgcctagagtactttcccagcaagatgctgagaacgggcaacaactttgagtttacctacaactttgaggaggtgcccttccactccagcttcgctcccagtcagaacctcttcaagctggccaacccgctggtggaccagtacttgtaccgcttcgtgagcacaaataacactggcggagtccagttcaacaagaacctggccgggagatacgccaacacctacaaaaactggttcccggggcccatgggccgaacccagggctggaacctgggctccggggtcaaccgcgccagtgtcagcgccttcgccacgaccaataggatggagctcgagggcgcgagttaccaggtgcccccgcagccgaacggcatgaccaacaacctccagggcagcaacacctatgccctggagaacactatgatcttcaacagccagccggcgaacccgggcaccaccgccacgtacctcgagggcaacatgctcatcaccagcgagagcgagacgcagccggtgaaccgcgtggcgtacaacgtcggcgggcagatggccaccaacaaccagagctccaccactgcccccgcgaccggcacgtacaacctccaggaaatcgtgcccggcagcgtgtggatggagagggacgtgtacctccaaggacccatctgggccaagatcccagagacgggggcgcactttcacccctctccggccatgggcggattcggactcaaacacccaccgcccatgatgctcatcaagagcacgcctgtgcccggaaatatcaccagcttctcggacgtgcccgtcagcagcttcatcacccagtacagcaccgggcaggtcaccgtggagatggagtgggagctcaagaaggaaaactccaagaggtggaacccagagatccagtacacaaacaactacaacgacccccagtttgtggactttgccccggacagcaccggggaatacagaaccaccagacctatcggaacccgataccttacccgacccctttaa

SEQ ID NO: 1156 - DNA, 2175 bp, synthetic construct
  source 1..2175: mol_type = other DNA; note = Description of Artificial Sequence: Synthetic polynucleotide
atgtcttttgttgatcaccctccagattggttggaagaagttggtgaaggtcttcgcgagtttttgggccctgaagcgggcccaccgaaaccaaaacccaatcagcagcatcaagatcaagcccgtggtcttgtgctgcctggttataactatctcggacccggaaacggtctcgatcgaggagagcctgtcaacagggcagacgaggtcgcgcgagagcacgacatctcgtacaacgagcagcttgaggcgggagacaacccctacctcaagtacaaccacgcggacgccgagtttcaggagaagctcgccgacgacacatccttcgggggaaacctcggaaaggcagtctttcaggccaagaaaagggttctcgaaccttttggcctggttgaagagggtgctaagacggcccctaccggaaagcggatagacgaccactttccaaaaagaaagaaggtccggaccgaagaggactccaagccttccacctcgtcagacgccgaagctggacccagcggatcccagcagctgcaaatcccagcccaaccagcctcaagtttgggagctgatacaatgtctgcgggaggtggcggcccattgggcgacaataaccaaggtgccgatggagtgggcaatgcctcgggagattggcattgcgattccacgtggatgggggacagagtcgtcaccaagtccacccgaacctgggtgccgcccagctacaacaaccaccagtaccgagagatcaaaagcggctccgtcgacggaagcaacgccaacgcctactttggatacagcaccccctgggggtactttgactttaaccgcttccacagccactggagcccccgagactggcaaagactcatcaacaactactggggcttcagaccccggtccctcagagtcaaaatcttcaacattcaagtcaaagaggtcacggtgcaggactccaccaccaccatcgccaacaacctcacctccaccgtccaagtgtttacggacgacgactaccagctgccctacgtcgtcggcaacgggaccgagggatgcctgccggccttccctccgcaggtctttacgctgccgcagtacggttacgcgacgctgaaccgcgacaacacagaaaatcccaccgagaggagcagcttcttctgcctagagtactttcccagcaagatgctgagaacgggcaacaactttgagtttacctacaactttgaggaggtgcccttccactccagcttcgctcccagtcagaacctcttcaagctggccaacccgctggtggaccagtacttgtaccgcttcgtgagcacaaataacactggcggagtccagttcaacaagaacctggccgggagatacgccaacacctacaaaaactggttcccggggcccatgggccgaacccagggctggaacctgggctccggggtcaaccgcgccagtgtcagcgccttcgccacgaccaataggatggagctcgagggcgcgagttaccaggtgcccccgcagccgaacggcatgaccaacaacctccagggcagcaacacctatgccctggagaacactatgatcttcaacagccagccggcgaacccgggcaccaccgccacgtacctcgagggcaacatgctcatcaccagcgagagcgagacgcagccggtgaaccgcgtggcgtgcaacgtcggcgggcagatggccaccaacaaccagagctccaccactgcccccgcgaccggcacgtacaacctccaggaaatcgtgcccggcagcgtgtggatggagagggacgtgtacctccaaggacccatctgggccaagatcccagagacgggggcgcactttcacccctctccggccatgggcggattcggactcaaacacccaccgcccatgatgctcatcaagaacacgcctgtgcccggaaatatcaccagcttctcggacgtgcccgtcagcagcttcatcacccagtacagcaccgggcaggtcaccgtggagatggagtgggagctcaagaaggaaaactccaagaggtggaacccagagatccagtacacaaacaactacaacgacccccagtttgtggactttgccccggacagcaccggggaatacagaaccaccagacctattggaacccgataccttacccgacccctttaa

SEQ ID NO: 1157 - DNA, 2175 bp, synthetic construct
  source 1..2175: mol_type = other DNA; note = Description of Artificial Sequence: Synthetic polynucleotide
atgtcttttgttgatcaccctccagattggttggaagaagttggtgaaggtcttcgcgagtttttgggccttgaagcgggcccaccgaaaccaaaacccaatcagcagcatcaagatcaagcccgtggtcttgtgctgcctggttataactatctcggacccggaaacggtctcgatcgaggagagcctgtcaacagggcagacgaggtcgcgcgagagcacgacatctcgtacaacgagcagcttgaggcgggagacaacccctacctcaagtacaaccacgcggacgccgagtttcaggagaagctcgccgacgacacatccttcgggggaaacctcggaaaggcagtctttcaggccaagaaaagggttctcgaaccttttggcctggttgaagagggtgctaagacggcccctaccggaaagcggatagacgaccactttccaaaaagaaagaaggcccggaccgaagaggactccaagccttccacctcgtcagacgccgaagctggacccagcggatcccagcagctgcaaatcccagcccaaccagcctcaagtttgggagctgatacaatgtctgcgggaggtggcggcccattgggcgacaataaccaaggtgccgatggagtgggcaatgcctcgggagattggcattgcgattccacgtggatgggggacagagtcgtcaccaagtccacccgaacctgggtgctgcccagctacaacaaccaccagtaccgagagatcaaaagcggctccgtcgacggaagcaacgccaacgcctactttggatacagcaccccctgggggtactttgactttaaccgcttccacagccactggagcccccgagactggcaaagactcatcaacaactactggggcttcagaccccggtccctcagagtcaaaatcttcaacattcaagtcaaagaggtcacggtgcaggactccaccaccaccatcgccaacaacctcacctccaccgtccaagtgtttacggacgacgactaccagctgccctacgtcgtcggcaacgggaccgagggatgcctgccggccttccctccgcaggtctttacgctgccgcagtacggttacgcgacgctgaaccgcgacaacaccgaaaatcccaccgagaggagcagcttcttctgcctagagtactttcccagcaagatgctgagaacgggcaacaactttgagtttacctacaactttgaggaggtgcccttccactccagcttcgctcccagtcagaacctcttcaagctggccaacccgctggtggaccagtacttgtaccgcttcgtgagcacaaataacactggcggagtccagttcaacaagaacctggccgggagatacgccaacacctacaaaaactggttcccggggcccatgggccgaacccagggctggaacctgggctccggggtcaaccgcgccagtgtcagcgccttcgccacgaccaataggatggagctcgagggcgcgagttaccaggtgcccccgcagccgaacggcatgaccaacaacctccagggcagcaacacctatgccctggagaacactatgatcttcaacagccagccggcgaacccgggcaccaccgccacgtacctcgagggcaacatgctcatcaccagcgagagcgagacgcagccggtgaaccgcgtggcgtacaacgtcggcgggcagatggccaccaacaaccagagctccaccactgcccccgcgaccggcgcgtacaacctccaggaaatcgtgcccggcagcgtgtggatggagagggacgtgtacctccaaggacccatctgggccaagatcccagagacgggggcgcactttcacccctctccggccatgggcggattcggactcaaacacccaccgcccatgatgctcatcaagaacacgcctgtgcccggaaatatcaccagcttctcggacgtgcccgtcagcagcttcatcacccagtacagcaccgggcaggtcaccgtggagatggagtgggagctcaagaaggaaaactccaagaggtggaacccagagatccagtacacaaacaactacaacgacccccagtttgtggactttgccccggacagcaccggggaatacagaaccaccagacctatcggaacccgataccttacccgacccctttaa

SEQ ID NO: 1158 - DNA, 2175 bp, synthetic construct
  source 1..2175: mol_type = other DNA; note = Description of Artificial Sequence: Synthetic polynucleotide
atgtcttttgttgatcaccctccagattggttggaagaagttggtgaaggtcttcgcgagtttttgggccttgaagcgggcccaccgaaaccaaaacccaatcagcagcatcaagatcaagcccgtggtcttgtgctgcctggttataactatctcggacccggaaacggtctcgatcgaggagagcctgtcaacagggcagacggggtcgcgcgagagcacgacatctcgtacaacgagcagcttgaggcgggagacaacccctacctcaagtacaaccacgcggacgccgagtttcaggagaagctcgccgacgacacatccttcgggggaaacctcggaaaggcagtctttcaggccaagaaaagggttctcgaaccttttggcctggttgaagagggtgctaagacggcccctaccggaaagcggatagacgaccactttccaaaaagaaagaaggcccggaccgaagaggactccaagccttccacctcgtcagacgccgaagctggacccagcggatcccagcagctgcaaatcccagcccaaccagcctcaagtttgggagctgatacaatgtctgcgggaggtggcggcccattgggcgacaataaccaaggtgccgatggagtgggcaatgcctcgggagattggcattgcgattccacgtggatgggggacagagtcgtcaccaagtccacccgaacctgggtgctgcccagctacaacaaccaccagtaccgagagatcaaaagcggctccgtcgacggaagcaacgccaacgcctactttggatacagcaccccctgggggtactttgactttaaccgcttccacagccactggagcccccgagactggcaaagactcatcaacaactactggggcttcagaccccggtccctcagagtcaaaatcttcaacattcaagtcaaagaggtcacggtgcaggactccaccaccaccatcgccaacaacctcacctccaccgtccaagcgtttacggacgacgactaccagctgccctacgtcgtcggcaacgggaccgagggatgcctgccggccttccctccgcaggtctttacgctgccgcagtacggttacgcgacgctgaaccgcgacaacacagaaaatcccaccgagaggagcagcttcttctgcctagagtactttcccagcaagatgctgagaacgggcaacaactttgagtttacctacaactttgaggaggtgcccttccactccagcttcgctcccagtcagaacctcttcaagctggccaacccgctggtggaccagtacttgtaccgcttcgtgagcacaaataacactggcggagtccagttcaacaagaacctggccgggagatacgccaacacctacaaaaactggttcccggggcccatgggccgaacccagggctggaacctgggctccggggtcaaccgcgccagtgtcagcgccttcgccacgaccaataggatggagctcgagggcgcgagttaccaggtgcccccgcagccgaacggcatgaccaacaacctccagggcagcaacacctatgccctggagaacactatgatcttcaacagccagccggcgaacccgggcaccaccgccacgtacctcgagggcaacatgctcatcaccagcgagagcgagacgcagccggtgaaccgcgtggcgtacaacgtcggcgggcagatggccaccaacaaccagagctccaccactgcccccgcgaccggcacgtacaacctccaggaaatcgtgcccggcagcgtgtggatggagagggacgtgtacctccaaggacccatctgggccaagatcccagagacgggggcgcactttcacccctctccggccatgggcggattcggactcaaacacccaccgcccatgatgctcatcaagaacacgcctgtgcccggaaatatcaccagcttctcggacgtgcccgtcagcagcttcatcacccagtacagcaccgggcaggtcaccgtggagatggagtgggagctcaagaaggaaaactccaagaggtggaacccagagatccagtacacaaacaactacaacgacccccagtttgtggactttgccccggacagcaccggggaatacagaaccaccagacctatcggaacccgataccttacccgacccctttaa

SEQ ID NO: 1159 - DNA, 2175 bp, synthetic construct
  source 1..2175: mol_type = other DNA; note = Description of Artificial Sequence: Synthetic polynucleotide
atgtcttttgttgatcaccctccagattggttggaagaagttggtgaaggtcttcgcgagtttttgggccttgaagcgggcccaccgaaaccaaaacccaatcagcagcatcaagatcaagcccgtggtcttgtgctgcctggttataactatctcggacccggaaacggtctcgatcgaggagagcctgtcaacagggcagacgaggtcgcgcgagagcacgacatctcgtacaacgagcagcttgaggcgggagacaacccctacctcaagtacaaccacgcggacgccgagtttcaggagaagctcgccgacgacacatccttcgggggaaacctcggaaaggcagtctttcaggccaagaaaagggttctcgaaccttttggcctggttgaagagggtgctaagacggcccctaccggaaagcggatagacgaccactttccaaaaagaaagaaggcccggaccgaagaggactccaagccttccacctcgtcagacgccgaagctggacccagcggatcccagcagctgcaaatcccagcccaaccagcctcaagtttgggagctgatacaatgtctgcgggaggtggcggcccattgggcgacaataaccaaggtgccgatggagtgggcaatgcctcgggagattggcattgcgattccacgtggatgggggacagagtcgtcaccaagtccacccgaacctgggtgctgcccagctacaacaaccaccagtaccgagagatcaaaagcggctccgtcgacggaagcaacgccaacgcctactttggatacagcaccccctgggggtactttgactttaaccgcttccacagccactggagcccccgagactggcaaagactcatcaacaactactggggcttcagaccccggtccctcagagtcaaaatcttcaacattcaagtcaaagaggtcacggtgcaggactccaccaccaccatcgccaacaacctcacctccaccgtccaagtgtttacggacgacgactaccagctgccctacgtcgtcggcaacgggaccgagggatgcctgccggccttccctccgcaggtctttacgctgccgcagtacggttacgcgacgctgaaccgcgacaacacagaaaatcccaccgagaggagcagcttcttctgcctagagtactttcccagcaagatgctgagaacgggcaacaactttgagtttacctacaactttgaggaggtgcccttccactccagcttcgctcccagtcagaacctcttcaagctggccaacccgctggtggaccagtacttgtaccgcttcgtgagcacaaataacactggcggagtccagttcaacaagaacctggccgggagatacgccaacacctacaaaaactggttcccggggcccatgggccgaacccagggctggaacctgggctccggggtcaaccgcgccagtgtcagcgccttcgccacgaccaataggatggagctcgagggcgcgagttactaggtgcccccgcagccgaacggcatgaccaacaacctccagggcagcaacacctatgccctggagaacactatgatcttcaacagccagccggcgaacccgggcaccaccgccacgtacctcgagggcaacatgctcatcaccagcgagagcgagacgcagccggtgaaccgcgtggcgtacaacgtcggcgggcagatggccaccaacaaccagagctccaccactgcccccgcgaccggcacgtacaacctccaggaaatcgtgcccggcagcgtgtggatggagggggacgtgtacctccaaggacccatctgggccaagatcccagagacgggggcgcactttcacccctctccggccatgggcggattcggactcaagcacccaccgcccatgatgctcatcaagaacacgcctgtgcccggaaatatcaccagcttctcggacgtgcccgtcagcagcttcatcacccagtacagcaccgggcaggtcaccgtggagatggagtgggagctcaagaaggaaaactccaagaggtggaacccagagatccagtacacaaacaactacaacgacccccagtttgtggactttgccccggacagcaccggggaatacagaaccaccagacctatcggaacccgataccttacccgacccctttaa

SEQ ID NO: 1160 - DNA, 2175 bp, synthetic construct
  source 1..2175: mol_type = other DNA; note = Description of Artificial Sequence: Synthetic polynucleotide
atgtcttttgttgatcaccctccagattggttggaagaagttggtgaaggtcttcgcgagtttttgggccttgaagcgggcccaccgaaaccaaaacccaatcagcagcatcaagatcaagcccgtggtcttgtgctgcctggttataactatctcggacccggaaacggtctcgatcgaggagagcctgtcaacagggcagacgaggtcgcgcgagagcacgacatctcgtacaacgagcagcttgaggcgggagacaacccctacctcaagtacaaccacgcggacgccgagtttcaggagaagctcgccgacgacacatccttcgggggaaacctcggaaaggcagtctttcaggccaagaaaagggttctcgaaccttttggcctggttgaagagggtgctaagacggcccctaccggaaagcggatagacgaccactttccaaaaagaaagaaggtccggaccgaagaggactccaagccttccacctcgtcagacgccgaagctggacccagcggatcccagcagctgcaaatcccagcccaaccagcctcaagtttgggagctgatacaatgtctgcgggaggtggcggcccattgggcgacaataaccaaggtgccgatggagtgggcaatgcctcgggagattggcattgcgattccacgtggatgggggacagagtcgtcaccaagtccacccgaacctgggtgctgcccagctacaacaaccaccagtaccgagagatcaaaagcggctccgtcgacggaagcaacgccaacgcctactttggatacagcaccccctgggggtactttgactttaaccgcttccacagccactggagcccccgagactggcaaagactcatcaacaactactggggcttcagaccccggtccctcagagtcaaaatcttcaacattcaagtcaaagaggtcacggtgcaggactccaccaccaccatcgccaacaacctcacctccaccgtccaagtgtttacggacgacgactaccagctgccctacgtcgtcggcaacgggaccgagggatgcctgccggccttccctccgcaggtctttacgctgccgcagtacggttacgcgacgctgaaccgcgacaacacagaaaatcccaccgagaggagcagcttcttctgcctagagtactttcccagcaagatgctgagaacgggcaacaactttgagtttacctacaactttgaggaggtgcccttccactccagcttcgctcccagtcagaacctcttcaagctggccaacccgctggtggaccagtacttgtaccgcttcgtgagcacaaataacactggcggagtccagttcaacaagaacctggccgggagatacgccaacacctacaaaaactggttcccggggcccatgggccgaacccagggctggaacctgggctccggggtcaaccgcgccagtgtcagcgccttcgccacgaccaataggatggagctcgagggcgcgagttaccaggtgcccccgcagccgaacggcatgaccaacaacctccagggcagcaacacctatgccctggagaacactatgatcttcaacagccagccggcgaacccgggcaccaccgccacgtacctcgagggcaacatgctcatcaccagcgagagcgagacgcagccggtgaaccgcgtggcgtacaacgtcggcgggcagatggccaccaacaaccagagctccaccactgcccccgcgaccggcacgtacaacctccaggaaatcgtgcccggcagcgtgtggatggagagggacgtgtacctccaaggacccatctgggccaagatcccagagacgggggcgcactttcacccctctccggccatgggcggattcggactcaaacacccaccgcccatgatgctcatcaagaacacgcctgtgcccggaaatatcaccagcttctcggacgtgcccgtcagcagcttcatcacccagtacagcaccgggcaggtcaccgtggagatggagtgggagctcaagaaggaaaactccgagaggtggaacccagagatccagtacacaaacaactacaacgacccccagtttgtggactttgccccggacagcaccggggaatacagaaccaccagacctattggaacccgataccttacccgacccctttaa

SEQ ID NO: 1161 - DNA, 2175 bp, synthetic construct
  source 1..2175: mol_type = other DNA; note = Description of Artificial Sequence: Synthetic polynucleotide
atgtcttttgttgatcaccctccagattggttggaagaagttggtgaaggtcttcgcgagtttttgggccttgaagcgggcccaccgaaaccaaaacccaatcagcagcatcaagatcaagcccgtggtcttgtgctgcctggttataactatctcggacccggaaacggtctcgatcgaggagagcctgtcaacagggcagacgaggtcgcgcgagagcacgacatctcgtacagcgagcagcttgaggcgggagacaacccctacctcaagtacaaccacgcggacgccgagtttcaggagaagctcgccgacgacacatccttcgggggaaacctcggaaaggcagtctttcaggccaagaaaagggttctcgaaccttttggcctggttgaagagggtgctaagacggcccctaccggaaagcggatagacgaccactttccaaaaagaaagaaggcccggaccgaagaggactccaagccttccacctcgtcagacgccgaagctggacccagcggatcccagcagctgcaaatcccagcccaaccagcctcaagtttgggagctgatacaatgtctgcgggaggtggcggcccattgggcgacaataaccaaggtgccgatggagtgggcaatgcctcgggagattggcattgcgattccacgtggatgggggacagagtcgtcaccaagtccacccgaacctgggtgctgcccagctacaacaaccaccagtaccgagagatcaaaagcggctccgtcgacggaagcaacgccaacgcctactttggatacagcaccccctgggggtactttgactttaaccgcttccacagccactggagcccccgagactggcaaagactcatcaacaactactggggcttcagaccccggtccctcagagtcaaaatcttcaacattcaagtcaaagaggtcacggtgcaggactccaccaccaccatcgccaacaacctcacctccaccgtccaagtgtttacggacgacgactaccagctgccctacgtcgtcggcaacgggaccgagggatgcctgccggccttccctccgcaggtctttacgctgccgcagtacggttacgcgacgctgaaccgcgacaacacagaaaatcccaccgagaggagcagcttcttctgcctagagtactttcccagcaagatgctgagaacgggcaacaactttgagtttacctacaactttgaggaggtgcccttccactccagcttcgctcccagtcagaacctcttcaagctggccaacccgctggtggaccagtacttgtaccgcttcgtgagcacaaataacactggcggagtccagttcaacaagaacctggccgggagatacgccaacacctacaaaaactggttcccggggcccatgggccgaacccagggctggaacctgggctccggggtcaaccgcgccagtgtcagcgccttcgccacgaccaataggatggagctcgagggcgcgagttaccaggtgcccccgcagccgaacggcatgaccaacaacctccagggcagcaacacctatgccctggagaacactatgatcttcaacagccagccggcgaacccgggcaccaccgccacgtacctcgagggcaacatgctcatcaccagcgagagcgagacgcagccggtgaaccgcgtggcgtacaacgtcggcgggcagatggccaccaacaaccagagctccaccactgcccccgcgaccggcacgtacaacctccaggaaatcgtgcccggcagcgtgtggatggagagggacgtgtacctccaaggacccatctgggccaagatcccagagacgggggcgcactttcacccctctccggccatgggcggattcggactcaaacacccaccgcccatgatgctcatcaagaacacgcctgtgcccggaaatatcaccagcttctcggacgtgcccgtcagcagcttcatcacccagtacagcaccgggcaggtcaccgtggagatggagtgggagctcaagaaggaaaactccaagaggtggaacccagagatccagtacacaaacaactacaacgacccccagtttgtggactttgccccggacagcaccggggaatacagaaccgccagacctatcggaacccgataccttacccgacccctttaa

SEQ ID NO: 1162 - DNA, 2175 bp, synthetic construct
  source 1..2175: mol_type = other DNA; note = Description of Artificial Sequence: Synthetic polynucleotide
atgtcttttgttgatcaccctccagattggttggaagaagttggtgaaggtcttcgcgagtttttgggccctgaagcgggcccaccgaaaccaaaacccaatcagcagcatcaagatcaagcccgtggtcttgtgctgcctggttataactatctcggacccggaaacggtctcgatcgaggagagcctgtcaacagggcagacgaggtcgcgcgagagcacgacatctcgtacaacgagcagcttgaggcgggagacaacccctacctcaagtacaaccacgcggacgccgagtttcaggagaagctcgccgacgacacatccttcgggggaaacctcggaaaggcagtctttcaggccaagaaaagggttctcgaaccttttggcctggttgaagagggtgctaagacggcccctaccggaaagcggatagacgaccactttccaaaaagaaagaaggcccggaccgaagaggactccaagccttccacctcgtcagacgccgaagctggacccagcggatcccagcagctgcaaatcccagcccaaccagcctcaagtttgggagctgatacaatgtctgcgggaggtggcggcccattgggcgacaataaccaaggtgccgatggagtgggcaatgcctcgggagattggcattgcgattccacgtggatgggggacagagtcgtcaccaagtccacccgaacctgggtgctgcccagctacaacaaccaccagtaccgagagatcaaaagcggctccgtcgacggaagcaacgccaacgcctactttggatacagcaccccctgggggtactttgactttaaccgcttccacagccactggagcccccgagactggcaaagactcatcaacaactactggggcttcagaccccggtccctcagagtcaaaatcttcaacattcaagtcaaagaggtcacggtgcaggactccaccaccaccatcgccaacaacctcacctccaccgtccaagtgtttacggacgacgactaccagctgccctacgtcgtcggcaacgggaccgagggatgcctgccggccttccctccgcaggtctttacgctgccgcagtacggttacgcgacgctgaaccgcgacaacacagaaaatcccaccgagaggagcagcttcttctgcctagagtactttcccagcaagatgctgagaacgggcaacaactttgagtttacctacaactttgaggaggtgcccttccactccagcttcgctcccagtcagaacctcttcaagctggccaacccgctggtggaccagtacttgtaccgcttcgtgagcacaaataacactggcggagtccagttcaacaagaacctggccgggagatacgccaacacctacaaaaactggttcccggggcccatgggccgaacccagggctggaacctgggctccggggtcaaccgcgccagtgtcagcgccttcgccacgaccaataggatggagctcgagggcgcgagttaccaggtgcccccgcagccgaacggcatgaccaacaacctccagggcagcaacacctatgccctggagaacactatgatcttcaacagccagccggcgaacccgggcaccaccgccacgtacctcgagggcaacatgctcatcaccagcgagagcgagacgcagccggtgaaccgcgtggcgtacaacgtcggcgggcagatgaccaccaacaaccagagctccaccactgcccccgcgaccggcacgtacaacctccaggaaatcgtgcccggcagcgtgtggatggagagggacgtgtacccccaaggacccatctgggccaagatcccagagacgggggcgcactttcacccctctccggccatgggcggattcggactcaaacacccaccgcccatgatgctcatcaagaacacgcctgtgcccggaaatatcaccagcttctcggacgtgcccgtcagcagcttcatcacccagtacagcaccgggcaggtcaccgtggagatggagtgggagctcaagaaggaaaactccaagaggtggaacccagagatccagtacacaaacaactacaacgacccccagtttgtggactttgccccggacagcaccggggaatacaggaccaccagacctatcggaacccgataccttacccgacccctttaa

SEQ ID NO: 1163 - DNA, 2175 bp, synthetic construct
  source 1..2175: mol_type = other DNA; note = Description of Artificial Sequence: Synthetic polynucleotide
atgtcttttgttgatcaccctccagattggttggaagaagttggtgaaggtcttcgcgagtttttgggccttgaagcgggcccaccgaaaccaaaacccaatcagcagcatcaagatcaagcccgtggtcttgtgctgcctggttataactatctcggacccggaaacggtctcgatcgaggagagcctgtcaacagggcagacgaggtcgcgcgagagcacgacatctcgtacaacgagcagcttgaggcgggagacaacccctacctcaagtacaaccacgcggacgccgagtttcaggagaagctcgccgacgacacatccttcgggggaaacctcggaaaggcagtctttcaggccaagaaaagggttctcgaaccttttggcctggttgaagagggtgctaagacggcccctaccggaaagcggatagacgaccactttccaaaaagaaagaaggcccggaccgaagaggactccaagccttccacctcgtcagacgccgaagctggacccagcggatcccagcagctgcaaatcccagcccaaccagcctcaagtttgggagctgatacaatgtctgcgggaggtggcggcccattgggcgacaataaccaaggtgccgatggagtgggcaatgcctcgggagattggcattgcgattccacgtggatgggggacagagtcgtcaccaagtccacccgaacctgggtgctgcccagctacaacaaccaccagtaccgagagatcaaaagcggctccgtcgacggaagcaacgccaacgcctactttggatacagcaccccctgggggtactttgactttaaccgcttccacagccactggagcccccgagactggcaaagactcatcaacaactactggggcttcagaccccggtccctcagagtcaaaatcttcaacattcaagtcaaagaggtcacggtgcaggactccaccaccaccatcgccaacaacctcacctccaccgtccaagtgtttacggacgacgactaccagctgccctacgtcgtcggcaacgggaccgagggatgcctgccggccttccctccgcaggtctttacgctgccgcagtacggttacgcgacgctgaaccgcgacaacacagaaaatcccaccgagaggagcagcttcctctgcctagagtactttcccagcaagatgctgagaacgggcaacaactttgagtttacctacaactttgaggaggtgcccttccactccagcttcgctcccagtcagaacctcttcaagctggccaacccgctggtggaccagtacttgtaccgcttcgtgagcacaaataacactggcggagtccagttcaacaagaacctggccgggagatacgccaacacctacaaaaactggttcccggggcccatgggccgaacccagggctggaacctgggctccggggtcaaccgcgccagtgtcagcgccttcgccacgaccaataggatggagctcgagggcgcgagttaccaggtgcccccgcagccgaacggcatgaccaacaacctccagggcagcaacacctatgccctggagaacactatgatcttcaacagccagccggcgaacccgggcaccaccgccacgtacctcgagggcaacatgctcatcaccagcgagagcgagacgcagccggtgaaccgcgtggcgtacaacgtcggcgggcagatggccaccaacaaccagagctccaccactgcccccgcgaccggcacgtacaacctccaggaaatcgtgcccggcagcgtgtggatgaagagggacgtgtacctccaaggacccatctgggccaagatcccagagacgggggcgcactttcacccctctccggccatgggcggattcggactcaaacacccaccgcccatgatgctcatcaagaacacgcctgtgcccggaaatatcaccagcttctcggacgtgcccgtcagcagcttcatcacccagtacagcaccgggcaggtcaccgtggagatggagtgggagctcaagaaggaaaactccaagaggtggaacccagagatccagtacacaaacaactacaacgacccccagtttgtggactttgccccggacagcaccggggaatacagaaccaccagacctatcggaacccgataccttacccgacccctttaa

SEQ ID NO: 1164 - DNA, 2175 bp, synthetic construct
  source 1..2175: mol_type = other DNA; note = Description of Artificial Sequence: Synthetic polynucleotide
atgtcttttgttgatcaccctccagattggttggaagaagttggtgaaggtcttcgcgagtttttgggccttgaggcgggcccaccgaaaccaaaacccaatcagcagcatcaagatcaagcccgtggtcttgtgctgcctggttataactatctcggacccggaaacggtctcgatcgaggagagcctgtcaacagggcagacgaggtcgcgcgagagcacgacatctcgtacaacgagcagcttgaggcgggagacaacccctacctcaagtacaaccacgcggacgccgagtttcaggagaagctcgccgacgacacatccttcgggggaaacctcggaaaggcagtctttcaggccaagaaaagggttctcgaaccttttggcctggttgaagagggtgctaagacggcccctaccggaaagcggatagacgaccactttccaaaaagaaagaaggcccggaccgaagaggactccaagccttccaccccgtcagacgccgaagctggacccagcggatcccagcagctgcaaatcccagcccaaccagcctcaagtttgggagctgatacaatgtctgcgggaggtggcggcccattgggcgacaataaccaaggtgccgatggagtgggcaatgcctcgggagattggcattgcgattccacgtggatgggggacagagtcgtcaccaagtccacccgaacctgggtgctgcccagctacaacaaccaccagtaccgagagatcaaaagcggctccgtcgacggaagcaacgccaacgcctactttggatacagcaccccctgggggtactttgactttaaccgcttccacagccactggagcccccgagactggcaaagactcatcaacaactactggggcttcagaccccggtccctcagagtcaaaatcttcaacattcaagtcaaagaggtcacggtgcaggactccaccaccaccatcgccaacaacctcacctccaccgtccaagtgtttacggacgacgactaccagctgccctacgtcgtcggcaacgggaccgagggatgcctgccggccttccctccgcaggtctttacgctgccgcagtacggttacgcgacgctgaaccgcgacaacacagaaaatcccaccgagaggagcagcttcttctgcctagagtactttcccagcaagatgctgagaacgggcaacaactttgagtttacctacaactttgaggaggtgcccttccactccagcttcgctcccagtcagaacctcttcaagctggccaacccgctggtggaccagtacttgtaccgcttcgtgagcacaaataacactggcggagtccagttcaacaagaacctggccgggagatacgccaacacctacaaaaactggttcccggggcccatgggccgaacccagggctggaacctgggctccggggtcaaccgcgccagtgtcagcgccttcgccacgaccaataggatggagctcgagggcgcgagttaccaggtgcccccgcagccgaacggcatgaccaacaacctccagggcagcaacacctatgccctggagaacactatgatcttcaacagccagccggcgaacccgggcaccaccgccacgtacctcgagggcaacatgctcatcaccagcgagagcgagacgcagccggtgaaccgcgtggcgtacaacgtcggcgggcagatggccaccaacaaccagagctccaccactgcccccgcgaccggcacgtacaacctccaggaaatcgtgcccggcagcgtgtggatggagagggacgtgtacctccaaggacccatctgggccaagatcccagagacgggggcgcactttcacccctctccggccatgggcggattcggactcaaacacccaccgcccatgatgctcatcaagaacacgcctgtgcccggaaatatcaccagcttctcggacgtgcccgtcagcagcttcatcacccagtacagcaccgggcaggtcaccgtggagatggagtgggagctcaagaaggaaaactccaagaggtggaacccagagatccagtacacaaacaactacaacgacccccagtttgtggactttgccccggacagcaccggggaatacagaaccaccagacctatcggaacccgataccttacccgacccctttaa

SEQ ID NO: 1165 - DNA, 2175 bp, synthetic construct
  source 1..2175: mol_type = other DNA; note = Description of Artificial Sequence: Synthetic polynucleotide
atgtcttttgttgatcaccctccagattggttggaagaagttggtgaaggtcttcgcgagtttttgggccttgaagcgggcccaccgaaaccaaaacccaatcagcagcatcaagatcaagcccgtggtcttgtgctgcctggttataactatctcggacccggaaacggtctcgatcgaggagagcctgtcaacagggcagacgaggtcgcgcgagagcacgacatctcgtacaacgagcagcttgaggcgggagacaacccctacctcaagtacaaccacgcggacgccgagtttcaggagaagctcgccgacgacacatccttcgggggaaacctcggaaaggcagtctttcaggccaagaaaagggttctcgaaccttttggcctggttgaagagggtgctaagacggcccctaccggaaagcggatagacgaccactttccaaaaagaaagaaggcccggaccgaagaggactccaagccttccacctcgtcagacgccgaagctggacccagcggatcccagcagctgcaaatcccagcccaaccagcctcaagtttgggagctgatacaatgtctgcgggaggtggcggcccattgggcgacaataaccaaggtgccgatggagtgggcaatgcctcgggagattggcattgcgattccacgtggatgggggacagagtcgtcaccaagtccacccgaacctgggtgctgcccagctacaacaaccaccagtaccgagagatcaaaagcggctccgtcgacggaagcaacgccaacgcctactttggatacagcaccccctgggggtactttgactttaaccgcttccacagccactggagcccccgagactggcaaagactcatcaacaactactggggcttcagaccccggtccctcagagtcaaaatcttcaacattcaagtcaaagaggtcacggtgcaggactccaccaccaccatcgccaacaacctcacctccaccgtccaagtgtttacggacgacgactaccagctgccctacgtcgtcggcaacgggaccgagggatgcctgccggccttccctccgcaggtctttacgctgccgcagtacggttacgcgacgctgaaccgcgacaacacagaaaatcccaccgagaggagcagcttcttctgcctagagtactttcccagcaagatgctgagaacgggcaacaactttgagtttacctacaactttgaggaggtgcccttccactccagcttcgctcccagtcagaacctcttcaagctggccaacccgctggtggaccagtacttgtaccgcttcgtgagcacaaataacactggcggagtccagttcaacaagaacctggccgggagatacgccaacacccacaaaaactggttcccggggcccatgggccgaacccagggctggaacctgggctccggggtcaaccgcgccagtgtcagcgccttcgccacgaccaataggatggagctcgagggcgcgagttaccaggtgcccccgcagtcgaacggcatgaccaacaacctccggggcagcaacacctatgccctggagaacactatgatcttcaacagccagccggcgaacccgggcaccaccgccacgtacctcgagggcaacatgctcatcaccagcgagagcgagacgcagccggtgaaccgcgtggcgtacaacgtcggcgggcagatggccaccaacaaccagagctccaccactgcccccgcgaccggcacgtacaacctccaggaaatcgtgcccggcagcgtgtggatggagagggacgtgtacctccaaggacccatctgggccaagatcccagagacgggggcgcactttcacccctctccggccatgggcggattcggactcaaacacccaccgcccatgatgctcatcaagaacacgcctgtgcccggaaatatcaccagcttctcggacgtgcccgtcagcagcttcatcacccagtacagcaccgggcaggtcaccgtggagatggagtgggagctcaagaaggaaaactccaagaggtggaacccagagatccagtacacaaacaactacaacgacccccagtttgtggactttgccccggacagcaccggggaatacagaaccaccagacctatcggaacccgataccttacccgacccctttaa

SEQ ID NO: 1166 - DNA, 2175 bp, synthetic construct
  source 1..2175: mol_type = other DNA; note = Description of Artificial Sequence: Synthetic polynucleotide
atgtcttttgttgatcaccctccagattggttggaagaagttggtgaaggtcttcgcgagtttttgggccttgaagcgggcccaccgaaaccaaaacccaatcagcagcatcaagatcaagcccgtggtcttgtgctgcctggttataactatctcggacccggaaacggtctcgatcgaggagagcctgtcaacagggcagacgaggtcgcgcgagagcacgacatctcgtacaacgagcagcttgaggcgggagacaacccctacctcaagtacaaccacgcggacgccgagtttcaggagaagctcgccgacgacacatccttcgggggaaacctcggaaaggcagtctttcaggccaagaaaagggttctcgaaccttttggcctggttgaagagggtgctaagacggcccctaccggaaagcggatagacgaccactttccaaaaagaaagaaggcccggaccgaagaggactccaagccttccacctcgtcagacgccgaagctggacccagcggatcccagcagctgcaaatcccagcccaaccagcctcaagtttgggagctgatacaatgtctgcgggaggtggcggcccattgggcgacaataaccaaggtgccgatggagtgggcaatgcctcgggagattggcattgcgattccacgtggatgggggacagagtcgtcaccaagtccacccgaacctgggtgctgcccagctacaacaaccaccagtaccgagagatcaaaagcggctccgtcgacggaagcaacgccaacgcctactttggatacagcaccccctgggggtactttgactttaaccgcttccacagccactggagcccccgagactggcaaagactcatcaacaactactggggcttcagaccccggtccctcagagtcaaaatcttcaacattcaagtcaaagaggtcacggtgcaggactccaccaccaccatcgccaacaacctcacctccaccgtccaagtgtttacggacgacgactaccagctgccctacgtcgtcggcaacgggaccgagggatgcctgccggccttccctccgcaggtctttacgctgccgcagtacggttacgcgacgctgaaccgcgacaacacagaaaatcccaccgagaggagcagcttcttctgcctagagtactttcccagcaagatgctgagaacgggcaacaactttgagtttacctacaactttgaggaggtgcccttccactccagcttcgctcccagtcagaacctcttcaagctggccaacccgctggtggaccagtacttgtaccgcttcgtgagcacaaataacactggcggagtccagttcaacaagaacctggccgggagatacgccaacacctacaaaaactggttcccggggcccatgggccgaacccagggctggaacctgggctccggggtcaaccgcgccagtgtcagcgccttcgccacgaccaataggatggagctcgagggcgcgagttaccaggtgcccccgcagccgaacggcatgaccaacaacctccagggcagcaacacctatgccctggagaacactatgatcttcaacagccagccggcgaacccgggcaccaccgccacgtacctcgagggcaacatgctcatcaccagcgagagcgagacgcagccggtgaaccgcgtggcgtacagcgtcggcgggcagatggccaccaacaaccagagctccaccactgcccccacgaccggcacgtacaacctccaggaaatcgtgcccggcagcgtgtggatggagagggacgtgtacctccaaggacccatctgggccaagatcccagagacgggggcgcactttcacccctctccggccatgggcggattcagactcaaacacccaccgcccatgatgctcatcaagaacacgcctgtgcccggaaatatcaccagcttctcggacgtgcccgtcagcagcttcatcacccagtacagcaccgggcaggtcaccgtggagatggagtgggagctcaagaaggaaaactccaagaggtggaacccagagatccagtacacaaacaactacaacgacccccagtttgtggactttgccccggacagcaccggggaatacagaaccaccagacctatcggaacccgataccttacccgacccctttaa

SEQ ID NO: 1167 - DNA, 2175 bp, synthetic construct
  source 1..2175: mol_type = other DNA; note = Description of Artificial Sequence: Synthetic polynucleotide
atgtcttttgttgatcaccctccagattggttggaagaagttggtgaaggtcttcgcgagtttttgggccttgaagcgggcccaccgaaaccaaaacccaatcagcagcatcaagatcaagcccgtggtcttgtgctgcctggttataactatctcggacccggaaacggtctcgatcgaggagagcctgtcaacagggcagacgaggtcgcgcgagagcacgacatctcgtacaacgagcagcttgaggcgggagacaacccctacctcaagtacaaccacgcggacgccgagtttcaggagaagctcgccgacgacacatccttcgggggaaacctcggaaaggcagtctttcaggccaagaaaagggttctcgaaccttttggcctggttgaagagggtgctaagacggcccctaccggaaagcggatagacgaccactttccaaaaagaaagaaggcccggaccgaagaggactccaagccttccacctcgtcagacgccgaagctggacccagcggatcccagcagctgcaaatcccagcccaaccagcctcaagtttgggagctgatacaatgtctgcgggaggtggcggcccattgggcgacaataaccaaggtgccgatggagtgggcaatgcctcgggagattggcattgcgattccacgtggatgggggacagagtcgtcaccaagtccacccgaacctgggtgctgcccagctacaacaaccaccagtaccgagagatcaaaagcggctccgtcgacggaagcaacgccaacgcctactttggatacagcaccccctgggggtactttgactttaaccgcttccacagccactggagcccccgagactggcaaagactcatcaacaactactggggcttcagaccccggtccctcagagtcaaaatcttcaacattcaagtcaaagaggtcacggtgcaggactccaccaccaccatcgccaacaacctcacctccaccgtccaagtgtttacggacgacgactaccagctgccctacgtcgtcggcaacgggaccgagggatgcctgccggccttccctccgcaggtctttacgctgccgcagtacggttacgcgacgctgaaccgcgacaacacagaaaatcccaccgagaggagcagcttcttctgcctagagtactttcccagcaagatgctgagaacgggcaacaactttgagtttacctacaactttgaggaggtgcccttccactccagcttcgctcccagtcagaacctcttcaagctggccaacccgctggtggaccagtacttgtaccgcttcgtgagcacaaataacactggcggagtccagttcaacaagaacctggccgggagatacgccaacacctacaaaaactggttcccggggcccatgggccgaacccagggctggaacctgggctccggggtcaaccgcgccagtgtcagcgccttcgccgcgaccaataggatggagctcgagggcgcgagttaccaggtgcccccgcagccgaacggcatgaccaacaacctccagggcagcaacacctatgccctggagaacactatgatcttcaacagccagccggcgaacccgggcaccaccgccacgtacctcgagggcaacatgctcatcaccagcgagagcgagacgcagccggtgaaccgcgtggcgtacaacgtcggcgggcagatggccaccaacaaccagagctccaccactgcccccgcgaccggcacgtacaacctccaggaaatcgtgcccggcggcgtgtggatggagagggacgtgtacctccaaggacccatctgggccaagatcccagagacgggggcgcactttcacccctctccggccatgggcggattcggactcaaacacccaccgcccatgatgctcatcaagaacacgcctgtgcccggaaataccaccagcttctcggacgtgcccgtcagcagcttcatcacccagtacagcaccgggcaggtcaccgtggagatggagtgggagctcaagaaggaaaactccaagaggtggaacccagagatccagtacacaaacaactacaacgacccccagtttgtggactttgccccggacagcaccggggaatacagaaccaccagacctatcggaacccgataccttacccgacccctttaa

SEQ ID NO: 1168 - DNA, 2175 bp, synthetic construct
  source 1..2175: mol_type = other DNA; note = Description of Artificial Sequence: Synthetic polynucleotide
atgtcttttgttgatcaccctccagattggttggaagaagttggtgaaggtcttcgcgagtttttgggccttgaagcgggcccaccgaaaccaaaacccaatcagcagcatcaagatcaagcccgtggtcttgtgctgcctggttataactatctcggacccggaaacggtctcgatcgaggagagcctgtcaacagggcagacgaggtcgcgcgagagcacgacatctcgtacaacgagcagcttgaggcgggagacaacccctacctcaagtacaaccacgcggacgccgagtttcaggagaagctcgccgacgacacatccttcgggggaaacctcggaaaggtagtctttcaggccaagaaaagggttctcgaaccttttggcctggttgaagagggtgctaagacggcccctaccggaaagcggatagacgaccactttccaaaaagaaagaaggcccggaccgaagaggactccaagccttccacctcgtcagacgccgaagctggacccagcggatcccagcagctgcaaatcccagcccaaccagcctcaagtttgggagctgatacaatgtctgcgggaggtggcggcccattgggcggcaataaccaaggtgccgatggagtgggcaatgcctcgggagattggcattgcgattccacgtggatgggggacagagtcgtcaccaagtccacccgaacctgggtgctgcccagctacaacaaccaccagtaccgagagatcaaaagcggctccgtcgacggaagcaacgccaacgcctactttggatacagcaccccctgggggtactttgactttaaccgcttccacagccactggggcccccgagactggcaaagactcatcaacaactactggggcttcagaccccggtccctcagagtcaaaatcttcaacattcaagtcaaagaggtcacggtgcaggactccaccaccaccatcgccaacaacctcacctccaccgtccaagtgtttacggacgacgactaccagctgccctacgtcgtcggcaacgggaccgagggatgcctgccggccttccctccgcaggtctttacgctgccgcagtacggttacgcgacgctgaaccgcgacaacacagaaaatcccaccgagaggagcagcttcttctgcctagagtactttcccagcaagatgctgagaacgggcaacaactttgagtttacctacaactttgaggaggtgcccttccactccagcttcgctcccagtcagaacctcttcaagctggccaacccgctggtggaccagtacttgtaccgcttcgtgagcacaaataacactggcggagtccagttcaacaagaacctggccgggagatacgccaacacctacaaaaactggttcccggggcccatgggccgaacccagggctggaacctgggctccggggtcaaccgcgccagtgtcagcgccctcgccacgaccaataggatggagctcgagggcgcgagttaccaggtgcccccgcagccgaacggcatgaccaacaacctccagggcagcaacacctatgccctggagaacactatgatcttcaacagccagccggcgaacccgggcaccaccgccacgtacctcgagggcaacatgctcatcaccagcgagagcgagacgcagccggtgaaccgcgtggcgtacaacgtcggcgggcagatggccaccaacaaccagagctccaccactgcccccgcgaccggcacgtacaacctccaggaaatcgtgcccggcagcgtgtggatggagagggacgtgtacctccaaggacccatctgggccaagatcccagagacgggggcgcactttcacccctctccggccatgggcggattcggactcaaacacccaccgcccatgatgctcatcaagaacacgcctgtgcccggaaatatcaccagcttctcggacgtgcccgtcagcagcttcatcacccagtacagcaccgggcaggtcaccgtggagatggagtgggagctcaagaaggaaaactccaagaggtggaacccagagatccagtacacaaacaactacaacgacccccagtttgtggactttgccccggacagcaccggggaatacagaaccaccagacctatcggaacccgataccttacccgacccctttaa

SEQ ID NO: 1169 - DNA, 2175 bp, synthetic construct
  source 1..2175: mol_type = other DNA; note = Description of Artificial Sequence: Synthetic polynucleotide
atgtcttttgttgatcaccctccagattggttggaagaagttggtgaaggtcttcgcgagtttttgggccttgaagcgggcccaccgaaaccaaaacccaatcagcagcatcaagatcaagcccgtggtcttgtgctgcctggttataactatctcggacccggaaacggtctcgatcgaggagagcctgtcaacagggcagacgaggtcgcgcgagagcacgacatctcgtacaacgagcagcttgaggcgggagacaacccctacctcaagtacaaccacgcggacgccgagtttcaggagaagctcgccgacgacacatccttcgggggaaacctcggaaaggcagtctttcaggccaagaaaagggttctcgaaccttttggcctggttgaagagggtgctaagacggcccctaccggaaagcggatagacgaccactttccaaaaagaaagaaggcccggaccgaagaggactccaagccttccacctcgtcagacgccgaagctggacccagcggatcccagcagctgcaaatcccagcccaaccagcctcaagtttgggagctgatacaatgtctgcgggaggtggcggcccattgggcgacaataaccaaggtgccgatggagtgggcaatgcctcgggagattggcattgcgattccacgtggatgggggacagagtcgtcaccaagtccacccgaacctgggtgctgcccagctacaacaaccaccagtaccgagagatcaaaagcggctccgtcgacggaagcaacgccaacgcctactttggatacagcaccccctgggggtactttgactttaaccgcttccacagccactggagcccccgagactggcaaagactcatcaacaactactggggcttcagaccccggtccctcagagtcaaaatcttcaacattcaagtcaaagaggtcacggtgcaggactccaccaccaccatcgccaacaacctcacctccaccgtccaagtgtttacggacgacgactaccagctgccctacgtcgtcggcaacgggaccgagggatgcctgccggccttccctccgcaggtctttacgctgccgcagtacggttacgcgacgctgaaccgcgacaacacagaaaatcccaccgagaggagcagcttcttctgcctagagtactttcccagcaagatgctgagaacgggcaacaactttgagtttacctacaactttgaggaggtgcccttccactccagcttcgctcccagtcagaacctcttcaagctggccaacccgctggtggaccagtacttgtaccgcttcgtgagcacaaataacactggcggagtccagttcaacaagaacctggccgggagatacgccaacacctacaaaaactggttcccggggcccatgggccgaacccagggctggaacctgggctccggggtcaaccgcgccagtgtcagcgccttcgccacgaccaataggatggagctcgagggcgcgagttaccaggtgcccccgcagccgaacggcatgaccaacaacctccagggcagcaacacctatgccctggagaacactatgatcttcaacagccagccggcgaacccgggcaccaccgccacgtacctcgagggcaacatgctcatcaccagcgagagcgagacgcagccggtgaaccgcgtggcgtacaacgtcggcgggcagatggccaccaacaaccagagctccaccactgcccccgcgaccggcacgtacaacctccaggaaatcgtgcccggcagcgtgtggatggagagggacgtgtacctccaaggacccatctgagccaagatcccagagacgggggcgcactttcacccctctccggccatgggcggattcggactcaaacacccaccgcccatgatgctcatcaagaacacgcctgtgcccggaaatatcaccagcttctcggacgtgcccgtcagcagcttcatcacccagtacagcaccgggcaggtcaccgtggagatggagtgggagctcaagaaggaaaactccaagaggtggaacccagagatccagtacacaaacaactacaacgacccccagtttgtggactttgccccggacagcaccggggaatgcagaaccaccagacctatcggaacccgataccttacccgacccctttaa

SEQ ID NO: 1170 - DNA, 2175 bp, synthetic construct
  source 1..2175: mol_type = other DNA; note = Description of Artificial Sequence: Synthetic polynucleotide
atgtcttttgttgatcaccctccagattggttggaagaagttggtgaaggtcttcgcgagtttttgggccttgaagcgggcccaccgaaaccaaaacccaatcagcagcatcaagatcaagcccgtggtcttgtgctgcctggttataactatctcggacccggaaacggtctcgatcgaggagagcctgtcaacagggcagacgaggtcgcgcgagagcacgacatctcgtacaacgagcagcttgaggcgggagacaacccctacctcaagtacaaccacgcggacgccgagtttcaggagaagctcgccgacgacacatccttcgggggaaacctcggaaaggcagtctttcaggccaagaaaagggttctcgaaccttttggcctggttgaagagggtgctaagacggcccctaccggaaagcggatagacgaccactttccaaaaagaaagaaggcccggaccgaagaggactccaagccttccacctcgtcagacgccgaagctggacccagcggatcccagcagctgcaaatcccagcccaaccagcctcaagtttgggagctgatacaatgtctgcgggaggtggcggcccattgggcgacaataaccaaggtgccgatggagtgggcaatgcctcgggagattggcattgcgattccacgtggatgggggacagagtcgtcaccaagtccacccgaacctgggtgctgcccagctacaacaaccaccagtaccgagagatcaaaagcggctccgtcgacggaagcaacgccaacgcctactttggatacagcaccccctgggggtactttgactttaaccgcttccacagccactggagcccccgagactggcaaagactcatcaacaactactggggcttcagaccccggtccctcagagtcaaaatcctcaacattcaagtcaaagaggtcacggtgcaggactccaccaccaccatcgccaacaacctcacctccaccgtccaagtgtttacggacgacgactaccagctgccctacgtcgtcggcaacgggaccgagggatgcctgccggccttccctccgcaggtctttacgctgccgcagtacggttacgcgacgctgaaccgcgacaacacagaaaatcccaccgagaggagcagcttcttctgcctagagtactttcccagcaagatgctgagaacgggcaacaactttgagtttacctacaactttgaggaggtgcccttccactccagcttcgctcccagtcagaacctcttcaagctggccaacccgctggtgggccagtacttgtaccgcttcgtgagcacaaataacactggcggagtccagttcaacgagaacctggccgggagatacgccaacacctacaaaaactggttcccggggcccatgggccgaacccagggctggaacctgggctccggggtcaaccgcgccagtgtcagcgccttcgccacgaccaataggatggagctcgagggcgcgagttaccaggtgcccccgcagccgaacggcatgaccaacaacctccagggcagcaacacctatgccctggagaacactatgatcttcaacagccagccggcgaacccgggcaccaccgccacgtacctcgagggcaacatgctcatcaccagcgagagcgagacgcagccggtgaaccgcgtggcgtacaacgtcggcgggcagatggccaccaacaaccagagctccaccactgcccccgcgaccggcacgtacaacctccaggaaatcgtgcccggcagcgtgtggatggagagggacgtgtacctccaaggacccatctgggccaagatcccagagacgggggcgcactttcacccctctccggccatgggcggattcggactcaaacacccaccgcccatgatgctcatcaagaacacgcctgtgcccggaaatatcaccagcttctcggacgtgcccgtcagcagcttcatcacccagtacagcaccgggcaggccaccgtggagatggagtgggagctcaagaaggaaaactccaagaggtggaacccagagatccagtacacaaacaactacaacgacccccagtttgtggactttgccccggacagcaccggggaatacagaaccaccagacctatcggaacccgataccttacccgacccctttaa

SEQ ID NO: 1171 - DNA, 2175 bp, synthetic construct
  source 1..2175: mol_type = other DNA; note = Description of Artificial Sequence: Synthetic polynucleotide
atgtcttttgttgatcaccctccagattggttggaagaagttggtgaaggtcttcgcgagtttttgggccttgaagcgggcccaccgaaaccaaaacccaatcagcagcatcaagatcaagcccgtggtcttgtgctgcctggttataactatctcggacccggaaacggcctcgatcgaggagagcctgtcaacagggcagacgaggtcgcgcgagagcacgacatctcgtacaacgagcagcttgaggcgggagacaacccctacctcaagtacaaccacgcggacgccgagtttcaggagaagctcgccgacgacacatccttcgggggaaacctcggaaaggcagtctttcaggccaagaaaagggttctcgaaccttttggcctggttgaagagggtgctaagacggcccctaccggaaagcggatagacgaccactttccaaaaagaaagaaggcccggaccgaagaggactccaagccttccacctcgtcagacgccgaagctggacccagcggatcccagcagctgcaaatcccagcccaaccagcctcaagtttgggagctgatacaatgtctgcgggaggtggcggcccattgggcgacaataaccaaggtgccgatggagtgggcaatgcctcgggagattggcattgcgattccacgtggatgggggacagagtcgtcaccaagtccacccgaacctgggtgctgcccagctacaacaaccaccagtaccgagagatcaaaagcggctccgtcgacggaagcaacgccaacgcctactttggatacagcaccccctgggggtactttgactttaaccgcttccacagccactggagcccccgagactggcaaagactcatcaacaactactggggcttcagaccccggtccctcagagtcaaaatcttcaacattcaagtcaaagaggtcacggtgcaggactccaccaccatcatcgccaacaacctcacctccaccgtccaagtgtttacggacgacgactaccagctgccctacgtcgtcggcaacgggaccgagggatgcctgccggccttccctccgcaggtctttacgctgccgcagtacggttacgcgacgctgaaccgcgacaacacagaaaatcccaccgagaggagcagcttcttctgcctagagtactttcccagcaagatgctgagaacgggcaacaactttgagtttacctacaactttgaggaggtgcccttccactccagcttcgcccccagtcagaacctcttcaagctggccaacccgctggtggaccagtacttgtaccgcttcgtgagcacaaataacactggcggagtccagttcaacaagaacctggccgggagatacgccaacacctacaaaaactggttcccggggcccatgggccgaacccagggctggaacctgggctccggggtcaaccgcgccagtgtcagcgccttcgccacgaccaataggatggagctcgagggcgcgagttaccaggtgcccccgcagccgaacggcatgaccaacaacctccagggcagcaacacctatgccctggagaacactatgatcttcaacagccagccggcgaacccgggcaccaccgccacgtacctcgagggcaacatgctcatcaccagcgagagcgagacgcagccggtgaaccgcgtggcgtacaacgtcggcgggcagatggccaccaacaaccagagctccaccactgcccccgcgaccggcacgtacaacctccaggaaatcgtgcccggcagcgtgtggatggagagggacgtgtacctccaaggacccatctgggccaagatcccagagacgggggcgcactttcacccctctccggccatgggcggattcggactcaaacacccaccgcccatgatgctcatcaagaacacgcctgtgcccggaaatatcaccagcttctcggacgtgcccgtcagcagcttcatcacccagtacagcaccgggcaggtcaccgtggagatggagtgggagctcaagaaggaaaactccaagaggtggaacccagagatccagtacacaaacaactacaacgacccccagtttgtggactttgccccggacagcaccggggaatacagaaccaccagacctatcggaacccgataccttacccgacccctttaa

SEQ ID NO: 1172 - DNA, 2175 bp, synthetic construct
  source 1..2175: mol_type = other DNA; note = Description of Artificial Sequence: Synthetic polynucleotide
atgtcttttgttgatcaccctccagattggttggaagaagttggtgaaggtcttcgcgagtttttgggccttgaagcgggcccaccgaaaccaaaacccaatcagcagcatcaagatcaagcccgtggtcttgtgctgcctggttataactatctcggacccggaaacggtctcgatcgaggagagcctgtcaacagggcagacgaggtcgcgcgagagcacgacatctcgtacaacgagcagcttgaggcgggagacaacccctacctcaagtacaaccacgcggacgccgagtttcaggagaagctcgccgacgacacatccttcgggggaaacctcggaaaggcagtctttcaggccaagaaaagggttctcgaaccttttggcctggttgaagagggtgctaagacggcccctaccggaaagcggatagacgaccactttccaaaaagaaagaaggcccggaccgaagaggactccaagccttccacctcgtcagacgccgaagctggacccagcggatcccagcagctgcaaatcccagcccaaccagcctcaagtttgggagctgatacaatgtctgcgggaggtggcggcccattgggcgacaataaccaaggtgccgatggagtgggcaatgcctcgggagattggcattgcgattccacgtggatgggggacagagtcgtcaccaagtccacccgaacctgggtgctgcccagctacaacaaccaccagtaccgagagatcaaaagcggctccgtcgacggaagcaacgccaacgcctactttggatacagcaccccctgggggtactttgactttaaccgcttccacagccactggagcccccgagactggcaaagactcatcaacaactactggggcttcagaccccggtccctcagagtcaaaatcttcaacattcaagtcaaagaggtcacggtgcaggactccaccaccaccatcgccaacaacctcacctccaccgtccaagtgtttacggacgacgactaccagctgccctacgtcgtcggcaacgggaccgagggatgcctgccggccttccctccgcaggtctttacgctgccgcagtacggttacgcgacgctgaaccgcgacaacacagaaaatcccaccgagaggagcagcttcttctgcctagagtactttcccagcaagatgctgagaacgggcaacaactttgagtttacctacaactttgaggaggtgcccttccactccagcttcgctcccagtcagaacctcttcaagctggccaacccgctggtggaccagtacttgtaccgcttcgtgagcacaaataacactggcggagtccagttcaacaagaacctggccgggagatacgccaacacctacaaaaactggttcccggggcccatgggccgaacccagggctggaacctgggctccggggtcaaccgcgccagtgtcagcgccttcgccacgaccaataggatggagctcgagggcgcgagttaccaggtgcccccgcagccgaacggcatgaccaacaacctccagggcagcaacacctatgccctggagaacactatgatcttcaacagccagccggcgaacccgggcaccaccgccacgtacctcgagggcaacatgctcatcaccagcgagagcgagacgcagccggtgaaccgcgtggcgtacaacgtcggcgggcagatggccaccaacaaccagagctccaccactgcccccgcgaccggcacgtacaacctccaggaaatcgtgcccggcagcgtgtggatggagagggacgtgtacctccaaggacccatctgggccaagatcccagagacgggggcgcactttcacccctctccggccatgggcggattcggactcaaacacccaccgcccatgatgctcatcaagaacacgcctgtgcccggaaatatcaccagcctctcggacgtgcccgtcagcagcttcatcacccagtacagcaccgggcaggtcaccgtggagatggagtgggagctcaagaaggaaaactccaagaggtggaacccagagatccagtacacaaacaactacaacgacccccagtttgtggactttgccccggacagcaccggggaatacagaaccaccagacctatcggaacccgataccttacccgacccctttaa

SEQ ID NO: 1173 - DNA, 2175 bp, synthetic construct
  source 1..2175: mol_type = other DNA; note = Description of Artificial Sequence: Synthetic polynucleotide
atgtcttttgttgatcaccctccagattggttggaagaagttggtgaaggtcttcgcgagtttttgggccttgaagcgggcccaccgaaaccaaaacccaatcagcagcatcaagatcaagcccgtggtcttgtgctgcctggttataactatctcggacccggaaacggtctcgatcgaggagagcctgccaacagggcagacgaggtcgcgcgagagcacgacatctcgtacaacgagcagcttgaggcgggagacaacccctacctcaagtacaaccacgcgggcgccgagtttcaggagaagctcgccgacgacacatccttcgggggaaacctcggaaaggcagtctttcaggccaagaaaagggttctcgaaccttttggcctggttgaagagggtgctaagacggcccctaccggaaagcggatagacgaccactttccaaaaagaaagaaggcccggaccgaagaggactccaagccttccacctcgtcagacgccgaagctggacccagcggatcccagcagctgcaaatcccagcccaaccagcctcaagtttgggagctgatacaatgtctgcgggaggtggcggcccattgggcgacaataaccaaggtgccgatggagtgggcaatgcctcgggagattggcattgcgattccacgtggatgggggacagagtcgtcaccaagtccacccgaacctgggtgctgcccggctacaacaaccaccagtaccgagagatcaaaagcggctccgtcgacggaagcaacgccaacgcctactttggatacagcaccccctgggggtactttgactttaaccgcttccacagccactggagcccccgagactggcaaagactcatcaacaactactggggcttcagaccccggtccctcagagtcaaaatcttcaacattcaagtcaaagaggtcacggtgcaggactccaccaccaccatcgccaacaacctcacctccaccgtccaagtgtttacggacgacgactaccagctgccctacgtcgtcggcaacgggaccgagggatgcctgccggccttccctccgcaggtctttacgctgccgcagtacggttacgcgacgctgaaccgcgacaacacagaaaatcccaccgagaggagcagcttcttctgcctagagtactttcccagcaagatgctgagaacgggcaacaactttgagtttacctacaactttgaggaggtgcccttccactccagcttcgctcccagtcagaacctcttcaagctggccaacccgctggtggaccagtacttgtaccgcttcgtgagcacaaataatactggcggagtccagttcaacaagaacctggccgggagatacgccaacacctacaaaaactggttcccggggcccatgggccgaacccagggctggaacctgggctccggggtcaaccgcgccagtgtcagcgccttcgccacgaccaataggatggagctcgagggcgcgagttaccaggtgcccccgcagccgaacggcatgaccaacaacctccagggcagcaacacctatgccctggagaacactatgatcttcaacagccagccggcgaacccgggcaccaccgccacgtacctcgagggcaacatgctcatcaccagcgagagcgagacgcagccggtgaaccgcgtggcgtacaacgtcggcgggcagatggccaccaacaaccagagctccaccactgcccccgcgaccggcacgtacaacctccaggaaatcgtgcccggcagcgtgtggatggagagggacgtgtacctccaaggacccatctgggccaagatcccagagacgggggcgcactttcacccctctccggccatgggcggattcggactcaaacacccaccgcccatgatgctcatcaagaacacgcctgtgcccggaaatatcaccagcttctcggacgtgcccgtcagcagcttcatcacccagtacagcaccgggcaggtcaccgtggagatggagtgggagctcaagaaggaaaactccaagaggtggaacccagagatccagtacacaaacaactacaacgacccccagtttgtggactttgccccggacagcaccggggaatacagaaccaccagacctatcggaacccgataccttacccgacccctttaa

SEQ ID NO: 1174 - DNA, 2175 bp, synthetic construct
  source 1..2175: mol_type = other DNA; note = Description of Artificial Sequence: Synthetic polynucleotide
atgtcttttgttgatcaccctccagattggttggaagaagttggtgaaggtcttcgcgagtttttgggccttgaagcgggcccaccgaaaccaaaacccaatcagcagcatcaagatcaagcccgtggtcttgtgctgcctggttataactatctcggacccggaaacggtctcgatcgaggagagcctgtcaacagggcagacgaggtcgcgcgagagcacgacatctcgtacaacgagcagcttgaggcgggagacaacccctacctcaagtacaaccacgcggacgccgagtttcaggagaagctcgccgacgacacatccttcgggggaaacctcggaaaggcagtctttcaggccaagaaaagggttctcgaaccttttggcctggttgaagagggtgctaagacggcccctaccggaaagcggatagacgaccactttccaaaaagaaagaaggcccggaccgaagaggactccaagcctcccacctcgtcagacgccgaagctggacccagcggatcccagcagctgcaaatcccagcccaaccagcctcaagtttgggagctgatacaatgtctgcgggaggtggcggcccattgggcgacaataaccaaggtgccgatggagtgggcaatgcctcgggagattggcattgcgattccacgtggatgggggacagagtcgtcaccaagtccacccgaacctgggtgctgcccagctacaacaaccaccagtaccgagagatcaaaagcggctccgtcgacggaagcaacgccaacgcctactttggatacagcaccccctgggggtactttgactttaaccgcttccacagccactggagcccccgagactggcaaagactcatcaacaactactggggcttcagaccccggtccctcagagtcaaaatcttcaacattcaagtcaaagaggtcacggtgcaggactccgccaccaccatcgccaacaacctcacctccaccgtccaagtgtttacggacgacgactaccagctgccctacgtcgtcggcaacgggaccgagggatgcctgccggccttccctccgcaggtctttacgctgccgcagtacggttacgcgacgctgaaccgcgacaacacagaaaatcccaccgagaggagcagcttcttctgcctagagtactttcccagcaagatgctgagaacgggcaacaactttgagtttacctacaactttgaggaggtgcccttccactccagcttcgctcccagtcagaacctcttcaagctggccaacccgctggtggaccagtacttgtaccgcttcgtgagcacaaataacactggcggagtccagttcaacaagaacctggccgggagatacgccaacacctacaaaaactggttcccggggcccatgggccgaacccagggctggaacctgggctccggggtcaaccgcgccagtgtcagcgccttcgccacgaccaataggatggagctcgagggcgcgagttaccaggtgcccccgcagccgaacggcatgaccaacaacctccagggcagcaacacctatgccctggagaacactatgatcttcaacagccagccggcgaacccgggcaccaccgccacgtacctcgagggcaacatgctcatcaccagcgagagcgagacgcagccggtgaaccgcgtggcgtacaacgtcggcgggcagatggccaccaacaaccagagctccaccactgcccccgcgaccggcacgtacaacctccaggaaatcgtgcccggcagcgtgtggatggagagggacgtgtacctccaaggacccatctgggccaagatcccagagacgggggcgcactttcacccctctccggccatgggcggattcggactcaaacacccaccgcccatgatgctcatcaagaacacgcctgtgcccggaaatatcaccagcttctcggacgtgcccgtcagcagcttcatcacccagtacagcaccgggcaggtcaccgtggagatggagtgggagctcaagaaggaaaactccaagaggtggaacccagagatccagtacacaaacaactacaacgacccccagtttgtggactttgccccggacagcaccggggaatacagaaccaccagacctatcggaacccgataccttacccgacccctttaa

SEQ ID NO: 1175 - DNA, 2175 bp, synthetic construct
  source 1..2175: mol_type = other DNA; note = Description of Artificial Sequence: Synthetic polynucleotide
atgtcttttgttgatcaccctccagattggttggaagaagttggtgaaggtcttcgcgagtttttgggccttgaagcgggcccaccgaaaccaaaacccaatcagcagcatcaagatcaagcccgtggtcttgtgctgcctggttataactatctcggacccggaaacggtctcgatcgaggagagcctgtcaacagggcagacgaggtcgcgcgagagcacgacatctcgtacaacgagcagcttgaggcgggagacaacccctacctcaagtacaaccacgcggacgccgagtttcaggagaagctcgccgacgacacatccttcgggggaaacctcggaaaggcagtctttcaggccaagaaaagggttctcgaaccttttggcctggttgaagagggtgctaagacggcccctaccggaaagcggatagacgaccactttccaaaaagaaagaaggcccggaccgaagaggactccaagccttccacctcgtcagacgccgaagctggacccagcggatcccagcagccgcaaatcccagcccaaccagcctcaagtttgggagctgatacaatgtctgcgggaggtggcggcccattgggcgacaataaccaaggtgccgatggagtgggcaatgcctcgggagattggcattgcgattccacgtggatgggggacagagtcgtcaccaagtccacccgaacctgggtgctgcccagctacaacaaccaccagtaccgagagatcaaaagcggctccgtcgacggaagcaacgccaacgcctactttggatacagcaccccctgggggtactttgactttaaccgcttccacagccactggagcccccgagactggcaaagactcatcaacaactactggggcttcagaccccggtccctcagagtcaaaatcttcaacattcaagtcaaagaggtcacggtgcaggactccaccaccaccatcgccaacaacctcacctccaccgtccaagtgtttacggacgacgactaccagctgccctacgtcgtcggcaacgggaccgagggatgcctgccggccttccctccgcaggtctttacgctgccgcagtacggttacgcgacgctgaaccgcgacaacacagaaaatcccaccgagaggagcagcttcttctgcctagagtactttcccagcaagatgctgagaacgggcaacaactttgagtttacctacaactttgaggaggtgcccttccactccagcttcgctcccagtcagaacctcttcaagctggccaacccgctggtggaccagtacttgtaccgcttcgtgagcacaaataacactggcggagtccagttcaacaagaacctggccgggagatacgccaacacctacaaaaactggttcccggggcccatgggccgaacccagggctggaacctgggctccggggtcaaccgcgccagtgtcagcgccttcgccacgaccaataggatggagctcgagggcgcgagttaccaggtgcccccgcagccgaacggcatgaccaacaacctccagggcagcaacacctatgccctggagaacactatgatcttcaacagccagccggcgaacccgggcaccaccgccacgtacctcgagggcaacatgctcatcaccagcgagagcgagacgcagccggtgaaccgcgtggcgtacaacgtcggcgggcagatggccaccaacaaccagagctccaccactgcccccgcgaccggcacgtacaacctccaggaaatcgtgcccggcagcgtgtggatggagagggacgtgtacctccaaggacccatctgggccaagatcccagagacgggggcgcactttcacccctctccggccatgggcggattcggactcaaacacccaccgcccatgatgctcatcaagaacacgcctgcgcccggaaatatcaccagcttctcggacgtgcccgtcagcagcttcatcacccagtacagcaccgggcaggtcaccgtggagatggagtgggagctcaagaaggaaaactccaagaggtggaacccagagatccagtacacaaacaactacaacgacccccagtttgtggactttgccccggacagcaccggggaatacagaaccaccagacctatcggaacccgataccttacccgacccctttaa

SEQ ID NO: 1176 - DNA, 2175 bp, synthetic construct
  source 1..2175: mol_type = other DNA; note = Description of Artificial Sequence: Synthetic polynucleotide
atgtcttttgttgatcaccctccagattggttggaagaagttggtgaaggtcttcgcgagtttttgggccttgaagcgggcccaccgaaaccaaaacccaatcagcagcatcaagatcaagcccgtggtcttgtgctgcctggttataactatctcggacccggaaacggtctcgatcgaggagagcctgtcaacagggcagacgaggtcgcgcgagagcacgacatctcgtacaacgagcagcttgaggcgggagacaacccctacctcaagtacaaccacgcggacgccgagtttcaggagaagctcgccgacgacacatccttcgggggaaacctcggaaaggcagtctttcaggccaagaaaagggttctcgaaccttttggcctggttgaagagggtgctaagacggcccctaccggaaagcggatagacgaccactttccaaaaagaaagaaggcccggaccgaagaggactccaagcctcccacctcgtcagacgccgaagctggacccagcggatcccagcagctgcaaatcccagcccaaccagcctcaagtttgggagctgatacaatgtctgcgggaggtggcggcccattgggcgacaataaccaaggtgccgatggagtgggcaatgcctcgggagattggcattgcgattccacgtggatgggggacagagtcgtcaccaagtccacccgaacctgggtgctgcccagctacaacaaccaccagtaccgagagatcaaaagcggctccgtcgacggaagcaacgccaacgcctactttggatacagcaccccctgggggtactttgactttaaccgcttccacagccactggagcccccgagactggcaaagactcatcaacaactactggggcttcagaccccggtccctcagagtcaaaatcttcaacattcaagtcaaagaggtcacggtgcaggactccaccaccaccatcgccaacaacctcacctccaccgtccaagtgtttacggacgacgactaccagctgccctacgtcgtcggcaacgggaccgagggatgcctgccggccttccctccgcaggtctttacgctgccgcagtacggttacgcgacgctgaaccgcgacaacacagaaaatcccaccgagaggagcagcttcttctgcctagagtactttcccagcaagatgctgagaacgggcaacaactttgagtttacctacaactttgaggaggtgcccttccactccagcttcgctcccagtcagaacctcttcaagctggccaacccgctggtggaccagtacttgtaccgcttcgtgagcacaaataacactggcggagtccagttcaacaagaacctggccgggagatacgccaacacctacaaaaactggttcccggggcccatgggccgaacccagggctggaacctgggctccggggtcaaccgcgccagtgtcagcgccttcgccacgaccaataggatggagctcgagggcgcgagttaccaggtgcccccgcagccgaacggcatgaccaacaacctccagggcagcaacacctatgccctggagaacactatgatcttcaacagccagccggcgaacccgggcaccaccgccacgtacctcgagggcaacatgctcatcaccagcgagagcgagacgcagccggtgaaccgcgtggcgtacaacgtcggcgggcagatggccaccaacaaccagagctccaccactgcccccgcgaccggcacgtacaacctccaggaaatcgtgcccggcagcgtgtggatggagagggacgtgtacctccaaggacccatctgggccaagatcccagagacgggggcgcactttcacccctctccggccatgggcggattcggactcaaacacccaccgcccatgatgctcatcaagaacacgcctgtgcccggaaatatcaccagcttctcggacgtgcccgtcagcagcttcatcacccagtacagcaccgggcaggtcaccgtggagatggagtgggagctcaagaaggaaaactccaagaggtggaacccagagatccagtacacaaacaactacaacgacccccagtttgtggactttgccccggacagcaccggggaatacagaaccaccagacctatcggaacccgataccttacccgacccctttaa

SEQ ID NO: 1177 - DNA, 2175 bp, synthetic construct
  source 1..2175: mol_type = other DNA; note = Description of Artificial Sequence: Synthetic polynucleotide
atgtcttttgttgatcaccctccagattggttggaagaagttggtgaaggtcttcgcgagtttttgggccttgaagcgggcccaccgaaaccaaaacccaatcagcagcatcaagatcaagcccgtggtcttgtgctgcctggttataactatctcggacccggaaacggtctcgatcgaggagagcctgtcaacagggcagacgaggtcgcgcgagagcacgacatctcgtacaacgagcagcttgaggcgggagacaacccctacctcaagtacaaccacgcggacgccgagtttcaggagaagctcgccgacgacacatccttcgggggaaacctcggaaaggcagtctttcaggccaagaaaagggttctcgaaccttttggcctggttgaagagggtgctaagacggcccctaccggaaagcggatagacgaccactttccaaaaagaaagaaggcccggaccgaagaggactccaagcctcccacctcgtcagacgccgaagctggacccagcggatcccagcagctgcaaatcccagcccaaccagcctcaagtttgggagctgatacaatgtctgcgggaggtggcggcccattgggcgacaataaccaaggtgccgatggagtgggcaatgcctcgggagattggcattgcgattccacgtggatgggggacagagtcgtcaccaagtccacccgaacctgggtgccgcccagctacaacaaccaccagtaccgagagatcaaaagcggctccgtcgacggaagcaacgccaacgcctactttggatacagcaccccctgggggtactttgactttaaccgcttccacagccactggagcccccgagactggcaaagactcatcaacaactactggggcttcagaccccggtccctcagagtcaaaatcttcaacattcaagtcaaagaggtcacggtgcaggactccaccaccaccatcgccaacaacctcacctccaccgtccaagtgtttacggacgacgactaccagctgccctacgtcgtcggcaacgggaccgagggatgcctgccggccttccctccgcaggtctttacgctgccgcagtacggttacgcgacgctgaaccgcgacaacacagaaaatcccaccgagaggagcagcttcttctgcctagagtactttcccagcaagatgctgagaacgggcaacaactttgagtttacctacaactttgaggaggtgcccttccactccagcttcgctcccagtcagaacctcttcaagctggccaacccgctggtggaccagtacttgtaccgcttcgtgagcacaaataacactggcggagtccagttcaacaagaacctggccgggagatacgccaacacctacaaaaactggttcccggggcccatgggccgaacccagggctggaacctgggctccggggtcaaccgcgccagtgtcagcgccttcgccacgaccaataggatggagctcgagggcgcgagttaccaggtgcccccgcagccgaacggcatgaccaacaacctccagggcagcaacacctatgccctggagaacactatgatcttcaacagccagccggcgaacccgggcaccaccgccacgtacctcgagggcaacatgctcatcaccagcgagagcgagacgcagccggtgaaccgcgtggcgtacaacgtcggcgggcagatggccaccaacaaccagagctccaccactgcccccgcgaccggcacgtacaacctccaggaaatcgtgcccggcagcgtgtggatggagagggacgtgtacctccaaggacccatctgggccaagatcccagagacgggggcgcactttcacccctctccggccatgggcggattcggactcaaacacccaccgcccatgatgctcatcaagaacacgcctgtgcccggaaatatcaccagcttctcggacgtgcccgtcagcagcttcatcacccagtacagcaccgggcaggtcgccgtggagatggagtgggagctcaagaaggaaaactccaagaggtggaacccagagatccagtacacaaacaactacaacgacccccagtttgtggactttgccccggacagcaccggggaatacagaaccaccagacctatcggaacccgataccttacccgacccctttaa

SEQ ID NO: 1178 - DNA, 2175 bp, synthetic construct
  source 1..2175: mol_type = other DNA; note = Description of Artificial Sequence: Synthetic polynucleotide
atgtcttttgttgatcaccctccagattggttggaagaagttggtgaaggtcttcgcgagtttttgggccttgaagcgggcccaccgaaaccaaaacccaatcagcagcatcaagatcaagcccgtggtcttgtgctgcctggttataactatctcggacccggaaacggtctcgatcgaggagagcctgtcaacagggcagacgaggtcgcgcgagagcacgacatctcgtacaacgagcagcttgaggcgggagacaacccctacctcaagtacaaccacgcggacgccgagtttcaggagaagctcgccgacgacacatccttcgggggaaacctcggaaaggcagtctttcaggccaagaaaagggttctcgaaccttttggcctggttgaagagggtgctaagacggcccctaccggaaagcggatagacgaccactttccaaaaagaaagaaggcccggaccgaagaggactccaagccttccacctcgtcagacgccgaagctggacccagcggatcccagcagctgcaaatcccagcccaaccagcctcaagtttgggagctgatacaatgtctgcgggaggtggcggcccattgggcgacaataaccaaggtgccgatggagtgggcaatgcctcgggagattggcattgcgattccacgtggatgggggacagagtcgtcaccaagtccacccgaacctgggtgctgcccagctacaacaaccaccagtaccgagagatcaaaagcggctccgtcgacggaagcaacgccaacgcctactttggatacagcaccccctgggggtactttgactttaaccgcttccacagccactggagcccccgagactggcaaagactcatcaacaactactggggcttcagaccccggtccctcagagtcaaaatcttcaacattcaagtcaaagaggtcacggtgcaggactccaccaccaccatcgccaacaacctcacctccaccgtccaagtgtttacggacgacgactaccagctgccctacgtcgtcggcaacgggaccgagggatgcctgccggccttccctccgcaggtctttacgctgccgcagtacggttacgcgacgctgaaccgcgacaacacagaaaatcccaccgagaggagcagcttcttctgcctagagtactttcccagcaagatgctgagaacgggcaacaactttgagtttacctacaactttgaggaggtgcccttccactccagcttcgctcccagtcagaacctcttcaagctggccaacccgctggtggaccagtacttgtaccgcttcgtgagcacaaataacactggcggagtccagttcaacaagaacctggccgggagatacgccaacacctacaaaaactggttcccggggcccatgggccgaacccagggctggaacctgggctccggggtcaaccgcgccagtgtcagcgccttcgccacgaccaataggatggagctcgagggcgcgagttaccaggtgcccccgcagccgaacggcatgaccaacaacctccagggcagcaacacctatgccctggagaacactatgatcttcaacagccagccggcgaacccgggcaccaccgccacgtacctcgagggcaacatgctcatcaccagcgagagcgagacgcagccggtgaaccgcgtggcgtacaacgtcggcgggcagatggccaccaacaaccagagctccaccactgcccccgcgaccggcacgtacaacctccaggaaatcgtgcccggcagcgtgtggatggagagggacgtgtacctccaaggacccatctgggccaagatcccagagacgggggcgcactttcacccctctccggccatgggcggattcggactcaaacacccaccgcccatgatgctcatcaagaacacgcctgcgcccggaaatatcaccagcttctcggacgtgcccgtcagcagcttcatcacccagtacagcaccgggcaggtcaccgtggagatggagtgggagctcaagaaggaaaactccaagaggtggaacccagagatccagtacacaaacaactacaacgacccccagtttgtggactttgccccggacagcaccggggaatacagaaccaccagacctatcggaacccgataccttacccgacccctttaa

SEQ ID NO: 1179 - DNA, 2175 bp, synthetic construct
  source 1..2175: mol_type = other DNA; note = Description of Artificial Sequence: Synthetic polynucleotide
atgtcttttgttgatcaccctccagattggttggaagaagttggtgaaggtcttcgcgagtttttgggccttgaagcgggcccaccgaaaccaaaacccaatcagcagcatcaagatcaagcccgtggtcttgtgctgcctggttataactatctcggacccggaaacggtctcgatcgaggagagcctgtcaacagggcagacgaggtcgcgcgagagcacgacatctcgtacaacgagcagcttgaggcgggagacaacccctacctcaagtacaaccacgcggacgccgagtttcaggagaagctcgccgacgacacatccttcgggggaaacctcggaaaggcagtctttcaggccaagaaaagggttctcgaaccttttggcctggctgaagagggtgctaagacggcccctaccggaaagcggatagacgaccactttccaaaaagaaagaaggcccggaccgaagaggactccaagccttccacctcgtcagacgccgaagctggacccagcggatcccagcagctgcaaatcccagcccaaccagcctcaagtttgggagctgatacaatgtctgcgggaggtggcggcccattgggcgacaataaccaaggtgccgatggagtgggcaatgcctcgggagattggcattgcgattccacgtggatgggggacagagtcgtcaccaagtccacccgaacctgggtgctgcccagctacaacaaccaccagtaccgagagatcaaaagcggctccgtcgacggaagcaacgccaacgcctactttggatacagcaccccctgggggtactttgactttaaccgcttccacagccactggagcccccgagactggcaaagactcatcaacaactactggggcttcagaccccggtccctcagagccaaaatcttcaacattcaagtcaaagaggtcacggtgcaggactccaccaccaccatcgccaacaacctcacctccaccgtccaagtgtttacggacgacgactaccagctgccctacgtcgtcggcaacgggaccgagggatgcctgccggccttccctccgcaggtctttacgctgccgcagtacggttacgcgacgctgaaccgcgacaacacagaaaatcccaccgagaggagcagcttcttctgcctagagtactttcccagcaagatgctgagaacgggcaacaaccttgagtttacctacaactttgaggaggtgcccttccactccagcttcgctcccagtcagaacctcttcaagctggccaacccgctggtggaccagtacttgtaccgcttcgtgagcacaaataacactggcggagtccagttcaacaagaacctggccgggagatacgccaacacctacaaaaactggttcccggggcccatgggccgaacccagggctggaacctgggctccggggtcaaccgcgccagtgtcagcgccttcgccacgaccaataggatggagctcgagggcgcgagttaccaggtgcccccgcagccgaacggcatgaccaacaacctccagggcagcaacacctatgccctggagaacactatgatcttcaacagccagccggcgaacccgggcaccaccgccacgtacctcgagggcaacatgctcatcaccagcgagagcgagacgcagccggtgaaccgcgtggtgcacaacgtcggcgggcagatggccaccaacaaccagagctccaccactgcccccgcgaccggcacgtacaacctccaggaaatcgtgcccggcagcgtgtggatggagagggacgtgtacctccaaggacccatctgggccaagatcccagagacgggggcgcactttcacccctctccggccatgggcggattcggactcaaacacccaccgcccatgatgctcatcaagaacacgcctgtgcccggaaatatcaccagcttctcggacgtgcccgtcagcagcttcatcacccagtacagcaccgggcaggtcaccgtggagatggagtgggagctcaagaaggaaaactccaagaggtggaacccggagatccagtacacaaacaactacaacgacccccagtttgtggactttgccccggacagcaccggggaatacagaaccaccagacctatcggaacccgataccttacccgacccctttaa

SEQ ID NO: 1180 - DNA, 2175 bp, synthetic construct
  source 1..2175: mol_type = other DNA; note = Description of Artificial Sequence: Synthetic polynucleotide
atgtcttttgttgatcaccctccagattggttggaagaagttggtgaaggtcttcgcgagtttttgggccttgaagcgggcccaccgaaaccaaaacccaatcagcagcatcaagatcaagcccgtggtcttgtgctgcctggttataactatctcggacccggaaacggtctcgatcgaggagagcctgtcaacagggcagacgaggtcgcgcgagagcacgacatctcgtacaacgagcagcttgaggcgggagacaacccctacctcaagtacaaccacgcggacgccgagtttcaggagaagctcgccgacgacacatccttcgggggaaacctcggaaaggcagtctttcaggccaagaaaagggttctcgaaccttttggcctggttgaagagggtgctaagacggcccctaccggaaagcggatagacgaccactttccaaaaagaaagaaggcccggaccgaagaggactccaagccttccacctcgtcagacgccgaagctggacccagcggatcccagcagctgcaaatcccagcccaaccagcctcaagtttgggagctgatacaatgtctgcgggaggtggcggcccattgggcgacaataaccaaggtgccgatggagtgggcaatgcctcgggagattggcattgcgattccacgtggatgggggacagagtcgtcaccaagtccacccgaacctgggtgctgcccagctacaacaaccaccagtaccgagagatcaaaagcggctccgtcgacggaggcaacgccaacgcctactttggatacagcaccccctgggggtactttgactttaaccgcttccacagccactggagcccccgggactggcaaagactcatcaacaactactggggcttcagaccccggtccctcagagtcaaaatcttcaacattcaagtcaaagaggtcacggtgcaggactccaccaccaccatcgccaacaacctcacctccaccgtccaagtgtttacggacgacgactaccagctgccctacgtcgtcggcaacgggaccgagggatgcctgccggccttccctccgcaggtctttacgctgccgcagtacggttacgcgacgctgaaccgcgacaacacagaaaatcccaccgagaggagcagcttcttctgcctagagtactttcccagcaagatgctgagaacgggcaacaactttgagtttacctacaactttgaggaggtgcccttccactccagcttcgctcccagtcagaacctcttcaagctggccaacccgctggtggaccagtacttgtaccgcttcgtgagcacaaataacactggcggagtccagttcaacaagaacctggccgggagatacgccaacacctacaaaaactggttcccggggcccatgggccgaacccagggctggaacctgggctccggggtcaaccgcgccagtgtcagcgccttcgccacgaccaataggatggagctcgagggcgcgagttaccaggtgcccccgcagccgaacggcatgaccaacaacctccagggcagcaacacctatgccctggagaacactatgatcttcaacagccagccggcgaacccgggcaccaccgccacgtacctcgagggcaacatgctcatcaccagcgagagcgagacgcagccggtgaaccgcgtggcgtacaacgtcggcgggcagatggccaccaacaaccagagctccaccactgcccccgcgaccggcacgtacaacctccaggaaatcgtgcccggcagcgtgtggatggagagggacgtgtacctccaaggacccatctgggccaagatcccagagacgggggcgcactttcacccctctccggccatgggcggattcggactcaaacacccaccgcccatgatgctcatcaagaacacgcctgcgcccggaaatatcaccagcttctcggacgtgcccgtcagcagcttcatcacccagtacagcaccgggcaggtcaccgtggagatggagtgggagctcaagaagggaaactccaagaggtggaacccagagatccagtacacaaacaactacaacgacccccagtttgtggactttgccccggacagcaccggggaatacagaaccaccagacctatcggaacccgataccttacccgacccctttaa

SEQ ID NO: 1181 - DNA, 2175 bp, synthetic construct
  source 1..2175: mol_type = other DNA; note = Description of Artificial Sequence: Synthetic polynucleotide
atgtcttttgttgatcaccctccagattggttggaagaagttggtgaaggtcttcgcgagtttttgggccttgaagcgggcccaccgaaaccaaaacccaatcagcagcatcaagatcaagcccgtggtcttgtgctgcctggttataactatctcggacccggaaacggtctcgatcgaggagagcctgtcaacagggcagacgaggtcgcgcgagagcacgacatctcgtacaacgagcagcttgaggcgggagacaacccctacctcaagtacaaccacgcggacgccgagtttcaggagaagctcgccgacgacacgtccttcgggggaaacctcggaaaggcagtctttcaggccaagaaaagggttctcgaaccttttggcctggttgaagagggtgctaagacggcccctaccggaaagcggatagacgaccactttccaaaaagaaagaaggcccggaccgaagaggactccaagccttccacctcgtcagacgccgaagctggacccagcggatcccagcagctgcaaatcccagcccaaccagcctcaagtttgggagctgatacaatgtctgcgggaggtggcggcccattgggcgacaataaccaaggtgccgatggagtgggcaatgcctcgggagattggcattgcgattccacgtggatgggggacagagtcgtcaccaagtccacccgaacctgggtgctgcccagctacaacaaccaccagtaccgagagatcaaaagcggctccgtcgacggaagcaacgccaacgcctactttggatacagcaccccctgggggtactttgactttaaccgcttccacagccactggagcccccgagactggcaaagactcatcaacaactactggggcttcagaccccggtccctcagagtcaaaatcttcaacattcaagtcaaagaggtcacggtgcaggactccaccaccaccatcgccaacaacctcacctccaccgtccaagtgtttacggacgacgactaccagctgccctacgtcgtcggcaacgggaccgagggatgcctgccggccttccctccgcaggtctttacgctgccgcagtacggttacgcgacgctgaaccgcgacaacacagaaaatcccaccgagaggagcagcttcttctgcctagagtactttcccagcaagatgctgagaacgggcaacaactttgagtttacctacaactttgaggaggtgcccttccactccagcttcgctcccagtcagaacctcttcaagctggccaacccgctggtggaccagtacttgtaccgcttcgtgagcacaaataacactggcggagtccagttcaacaagaacctggccgggagatacgccaacacctacaaaaactggttcccggggcccatgggccgaacccagggctggaacctgggctccggggtcaaccgcgccagtgtcagcgccttcgccacgaccaataggatggagctcgagggcgcgagttaccaggtgcccccgcagccgaacggcatgaccaacaacctccagggcagcaacacctatgccctggagaacactatgatcttcaacagccagccggcgaacccgggcaccaccgccacgtacctcgagggcaacatgctcatcaccagcgagagcgagacgcagccggtgaaccgcgtggcgtacaacgtcggcgggcagatggccaccaacaaccagagctccaccactgcccccgcgaccggcacgtacaacctccaggaaatcgtgcccggcagcgtgtggatggagagggacgtgtacctccaaggacccatctgggccaagatcccagagacgggggtgcactttcacccctctccggccatgggcggattcggactcaaacacccaccgcccatgatgctcatcaagaacacgcctgtgcccggaaatatcaccagcttctcggacgtgcccgtcagcagcttcatcacccagtacagcaccgggcaggtcaccgtggagatggagtgggagctcaagaaggaaaactccaagaggtggaacccagagatccagtacacaaacaactacaacgacccccagtttgtggactttgccccggacagcaccggggaatacagaaccaccagacctatcggaacccgataccttacccgacccctttaa

SEQ ID NO: 1182 - DNA, 2175 bp, synthetic construct
  source 1..2175: mol_type = other DNA; note = Description of Artificial Sequence: Synthetic polynucleotide
  misc_difference 1652: note = modified_base - a, c, t, g, unknown or other
atgtcttttgttgatcaccctccagattggttggaagaagttggtgaaggtcttcgcgagtttttgggccttgaagcgggcccaccgaaaccaaaacccaatcagcagcatcaagatcaagcccgtggtcttgtgctgcctggttataactatctcggacccggaaacggtctcgatcgaggagagcctgtcaacagggcagacgaggtcgcgcgagagcacgacatctcgtacaacgagcagcttgaggcgggagacaacccctacctcaagtacaaccacgcggacgccgagtttcaggagaagctcgccgacgacacatccttcgggggaaacctcggaaaggcagtctttcaggccaagaaaagggttctcgaaccttttggcctggttgaagagggtgctaagacggcccctaccggaaagcggatagacgaccactttccaaaaagaaagaaggcccggaccgaggaggactccaagccttccacctcgtcagacgccgaagctggacccagcggatcccagcagctgcaaatcccagcccaaccagcctcaagtttgggagctgatacaatgtctgcgggaggtggcggcccattgggcgacaataaccaaggtgccgatggagtgggcaatgcctcgggagattggcattgcgattccacgtggatgggggacagagtcgtcaccaagtccacccgaacctgggtgctgcccagctacaacaaccaccagtaccgagagatcaaaagcggctccgtcgacggaagcaacgccaacgcctactttggatacagcaccccctgggggtactttgactttaaccgcttccacagccactggagcccccgagactggcaaagactcatcaacaactactggggcttcagaccccggtccctcagagtcaaaatcttcaacattcaagtcaaagaggtcacggtgcaggactccaccaccaccatcgccaacaacctcacctccaccgtccaagtgtttacggacgacgactaccagctgccctacgtcgtcggcaacgggaccgagggatgcctgccggccttccctccgcaggtctttacgctgccgcagtacggttacgcgacgctgaaccgcgacaacacagaaaatcccaccgagaggagcagcttcttctgcctagagtactttcccagcaagatgctgagaacgggcaacaactttgagtttacctacaactttgaggaggtgcccttccactccagcttcgctcccagtcagaacctcttcaagctggccaacccgctggtggaccagtacttgtaccgcttcgtgagcacaaataacactggcggagtccagttcaacaagaacctggccgggagatacgccaacacctacaaaaactggttcccggggcccatgggccgaacccagggctggaacctgggctccggggtcaaccgcgccagtgtcagcgccttcgccacgaccaataggatggagctcgagggcgcgagttaccaggtgcccccgcagccgaacggcatgaccaacaacctccagggcagcaacacctatgccctggagaacactatgatcttcaacagccagccggcgaacccgggcaccaccgccacgtacctcgagggcagcatgctcatcaccancgagagcgagacgcagccggtgaaccgcgtggcgtacaacgtcggcgggcagatggccaccaacaaccagagctccaccactgcccccgcgaccggcacgtacaacctccaggaaatcgtgcccggcagcgtgtggatggagagggacgtgtacctccaaggacccatctgggccaagatcccagagacgggggcgcactttcacccctctccggccatgggcggattcggactcaaacacccaccgcccatgatgctcatcaagaacacgcctgtgcccggaaatatcaccagcttctcggacgtgcccgtcagcagcttcatcacccagtacagcaccgggcaggtcaccgtggagatggagtgggagctcaagaaggaaaactccaagaggtggaacccagagatccagtacacaaacaactacaacgacccccagtttgtggactttgccccggacagcaccggggaatacagaaccaccagacctatcggaacccgataccttacccgacccctttaa

SEQ ID NO: 1183 - DNA, 2211 bp, synthetic construct
  source 1..2211: mol_type = other DNA; note = Description of Artificial Sequence: Synthetic polynucleotide
atggctgctgacggttatcttccagattggctcgaggacaacctttctgaaggcattcgtgagtggtgggctctgaaacctggagtccctcaacccaaagcgaaccaacaacaccaggacaaccgtcggggtcttgtgcttccgggttacaaatacctcggacccggtaacggactcgacaaaggagagccggtcaacgaggcggacgcggcagccctcgaacacgacaaagcttacgaccagcagctcaaggccggtgacaacccgtacctcaagtacaaccacgccgacgccgagtttcaggagcgtcttcaagaagatacgtcttttgggggcaaccttggcagagcagtcttccaggccaaaaagaggatccttgagcctcttggtctggttgaggaagcagctaaaacggctcctggaaagaagaggcctgtagatcagtctcctcaggaaccggactcatcatctggtgttggcaaatcgggcaaacagcctgccagaaaaagactaaatttcggtcagactggcgactcagagtcagtcccagaccctcaacctctcggagaaccaccagcagcccccacaagtttgggatctaatacaatggcttcaggcggtggcgcaccaatggcagacaataacgagggtgccgatggagtgggtaattcctcaggaaattggcattgcgattcccaatggctgggcgacagagtcatcaccaccagcaccagaacctgggccctgcccacttacaacaaccatctctacaagcaaatctccagccaatcaggagcttcaaacgacaaccactactttggctacagcaccccttgggggtattttgactttaacagattccactgccacttctcaccacgtgactggcagcgactcattaacaacaactggggattccggcccaagaaactcagcttcaagctcttcaacatccaagttaaagaggtcacgcagaacgatggcacgacgactattgccaataaccttaccagcacggttcaagtgtttacggactcggagtatcagctcccgtacgtgctcgggtcggcgcaccaaggctgtctcccgccgtttccagcggacgtcttcatggtccctcagtatggatacctcaccctgaacaacggaagtcaagcggtgggacgctcatccttttactgcctggagtacttcccttcgcagatgctaaggactggaaataacttccaattcagctataccttcgaggatgtaccttttcacagcagctacgctcacagccagagtttggatcgcttgatgaatcctcttattgatcagtatctgtactacctgaacagaacgcaaggaacaacctctggaacaaccaaccaatcacggctgctttttagccaggctgggcctcagtctatgtctttgcaggccagaaattggctacctgggccctgctaccggcaacagagactttcaaagactgctaacgacaacaacaacagtaactttccttggacagcggccagcaaatatcatctcaatggccgcgactcgctggtgaatccaggaccagctatggccagtcacaaggacgatgaagaaaaatttttccctatgcacggcaatctaatatttggcaaagaagggacaacggcaagtaacgcagaattagataatgtaatgattacggatgaagaagagattcgtaccaccaatcctgtggcaacagagcagtatggaactgtggcaaataacttgcagagctcaaatacagctcccacgactagaactgtcaatgatcagggggccttacctggcatggtgtggcaagatcgtgacgtgtaccttcaaggacctatctgggcaaagattcctcacacggatggacactttcatccttctcctctgatgggaggctttggactgaaacatccgcctcctcaaatcatgatcaaaaatactccggtaccggcaaatcctccgacgactttcagcccggccaagtttgcttcatttatcactcagtactccactggacaggtcagcgtggaaattgagtgggagctacagaaagaaaacagcaaacgttggaatccagagattcagtacacttccaactacaacaagtctgttaatgtggactttactgtagacactaatggtgtttatagtgaacctcgccctattggaacccggtatctcacacgaaacttgtaa

SEQ ID NO: 1184 - DNA, 2205 bp, synthetic construct; identical to SEQ ID NO: 452
  source 1..2205: mol_type = other DNA; note = Description of Artificial Sequence: Synthetic polynucleotide

SEQ ID NO: 1185 - DNA, 2234 bp, synthetic construct
  source 1..2234: mol_type = other DNA; note = Description of Artificial Sequence: Synthetic polynucleotide
atgtcttttgttgatcaccctccagattggttggaagaagttggtgaaggtcttcgcgagtttttgggccttgaagcgggcccaccgaaaccaaaacccaatcagcagcatcaagatcaagcccgtggtcttgtgctgcctggttataactatctcggacccggaaacggtctcgatcgaggagagcctgtcaacagggcagacgaggtcgcgcgagagcacgacatctcgtacaacgagcagcttgaggcgggagacaacccctacctcaagtacaaccacgcggacgccgagtttcaggagaagctcgccgacgacacatccttcgggggaaacctcggaaaggcagtctttcaggccaagaaaagggttctcgaaccttttggcctggttgaagagggtgctaagacggcccctaccggaaagcggatagacgaccactttccaaaaagaaagaaggctcggaccgaagaggactccaagccttccacctcgtcagacgccgaagctggacccagcggatcccagcagctgcaaatcccagcccaaccagcctcaagtttgggagctgatacaatgtctgcgggaggtggcggcccattgggcgacaataaccaaggtgccgatggagtgggcaatgcctcgggagattggcattgcgattccacgtggatgggggacagagtcgtcaccaagtccacccgaacctgggtgctgcccagctacaacaaccaccagtaccgagagatcaaaagcggctccgtcgacggaagcaacgccaacgcctactttggatacagcaccccctgggggtactttgactttaaccgcttccacagccactggagcccccgagactggcaaagactcatcaacaactactggggcttcagaccccggtccctcagagtcaaaatcttcaacattcaagtcaaagaggtcacggtgcaggactccaccaccaccatcgccaacaacctcacctccaccgtccaagtgtttacggacgacgactaccagctgccctacgtcgtcggcaacgggaccgagggatgcctgccggccttccctccgcaggtctttacgctgccgcagtacggttacgcgacgctgaaccgcgacaacacagaaaatcccaccgagaggagcagcttcttctgcctagagtactttcccagcaagatgctgagaacgggcaacaactttgagtttacctacaactttgaggaggtgcccttccactccagcttcgctcccagtcagaacctgttcaagctggccaacccgctggtggaccagtacttgtaccgcttcgtgagcacaaataacactggcggagtccagttcaacaagaacctggccgggagatacgccaacacctacaaaaactggttcccggggcccatgggccgaacccagggctggaacctgggctccggggtcaaccgcgccagtgtcagcgccttcgccacgaccaataggatggagctcgagggcgcgagttaccaggtgcccccgcagccgaacggcatgaccaacaacctccagggcagcaacacctatgccctggagaacactatgatcttcaacagccagccggcgaacccgggcaccaccgccacgtacctcgagggcaacatgctcatcaccagcgagagcgagacgcagccggtgaaccgcgtggcgtacaacgtcggcgggcagatggccaccaacaaccagagctccaccactgcccccgcgaccggcacgtacaacctccaggaaatcgtgcccggcagcgtgtggatggagagggacgtgtacctccaaggacccatctgggccaagatcccagagacgggggcgcactttcacccctctccggccatgggcggattcggactcaaacacccaccgcccatgatgctcatcaagaacacgcctgtgcccggaaatatcaccagcttctcggacgtgcccgtcagcagcttcatcacccagtacagcaccgggcaggtcaccgtggagatggagtgggagctcaagaaggaaaactccaagaggtggaacccagagatccagtacacaaacaactacaacgacccccagtttgtggactttgccccggacagcaccggggaatacagaaccaccagacctatcggaacccgataccttacccgacccctttaacccattcatgtcgcataccctcaataaaccgtgtattcgtgtcagtaaaatactgcctc

SEQ ID NO: 1186 - protein, 736 aa, synthetic construct
  source 1..736: note = Description of Artificial Sequence: Synthetic polypeptide
MAADGYLPDWLEDNLSEGIREWWALKPGVPQPKANQQHQDNRRGLVLPGYKYLGPGNGLDKGEPVNEADAAALEHDKAYDQQLKAGDNPYLKYNHADAEFQERLQEDTSFGGNLGRAVFQAKKRILEPLGLVEEAAKTAPGKKRPVDQSPQEPDSSSGVGKSGKQPARKRLNFGQTGDSESVPDPQPLGEPPAAPTSLGSNTMASGGGAPMADNNEGADGVGNSSGNWHCDSQWLGDRVITTSTRTWALPTYNNHLYKQISSQSGASNDNHYFGYSTPWGYFDFNRFHCHFSPRDWQRLINNNWGFRPKKLSFKLFNIQVKEVTQNDGTTTIANNLTSTVQVFTDSEYQLPYVLGSAHQGCLPPFPADVFMVPQYGYLTLNNGSQAVGRSSFYCPEYFPSQMLRTGNNFQFSYTFEDVPFHSSYAHSQSLDRLMNPLIDQYLYYLNRTQGTTSGTTNQSRLLFSQAGPQSMSLQARNWLPGPCYRQQRLSKTANDNNNSNFPWTAASKYHLNGRDSLVNPGPAMASHKDDEEKFFPMHGNLIFGKEGTTASNAELDNVMITDEEEIRTTNPVATEQYGTVANNLQSSNTAPTTRTVNDQGALPGMVWQDRDVYLQGPIWAKIPHTDGHFHPSPLMGGFGLKHPPPQIMIKNTPVPANPPTTFSPAKFASFITQYSTGQVSVEIEWELQKENSKRWNPEIQYTSNYNKSVNVDFTVDTNGVYSEPHPIGTRYLTRNL

SEQ ID NO: 1187 - protein, 736 aa, synthetic construct
  source 1..736: note = Description of Artificial Sequence: Synthetic polypeptide
MAADGYLPDWLEDNLSEGIREWWALKPGVPQPKANQQHQDNRRGLVLPGYKYLGPGNGLDKGEPVNEADAAALEHDKAYDQQLKAGDNPYLKYNHADAEFQERLQEDTSFGGNLGRAVFQAKKRILEPLGLVEEAAKTAPGKKRPVDQSPQEPDSSSGVGKSGKQPARKRLNFGQTGDSESVPDPQPLGEPPAAPTSLGSNTMASGGGAPMADNNEGADGVGNSSGNWHCDSQWLGDRVITTSTRTWALPTYNNHLYKQISSQSGASNDNHYFGYSTPWGYFDFNRFHCHFSPRDWQRLINNNWGFRPKKLSFKLFNIQVKEVTQNDGTTTVANNLTSTVQVFTDSEYQLPYVLGSAHQGCLPPFPADVFMVPQYGYLTLNNGSQAVGRSSFYCLEYFPSQMLRTGNNFQFSYTFEDVPFHSSYAHSQSLDRLMNPLIDQYLYYLNRTQGTTSGTTNQSRLLFSQAGPQSMSLQARNWLPGPCYRQQRLSKTANDNNNSNFPWTAASKYHLNGRDSLVNPGPAMASHKDDEEKFFPMHGNLIFGKEGTTASNAELDNVMITDEEEIRTTNPVATEQYGTVANNLQSSNTAPTTRTVNDQGALPGMVWQDRDVYLQGPIWAKIPHTDGHFHPSPLMGGFGLKHPPPQIMIKNTPVPANPPTTFSPAKFASFITQYSTGQVSVEIEWELQKENSKRWNPEIQYTSNYNKSVNVDFTVDTNGVYSEPRPIGTRYLTRNL

SEQ ID NO: 1188 - protein, 736 aa, synthetic construct
  source 1..736: note = Description of Artificial Sequence: Synthetic polypeptide
MAADGYLPDWLEDNLSEGIREWWALKPGVPQPKANQQHQDNRRGLVLPGYKYLGPGNGLDKGEPVNEADAAALEHDKAYDQQLKAGDNPYLKYNHADAEFQERLQEDTSFGGNLGRAVFQAKKRILEPLGLVEEAAKTAPGKKRPVDQSPQEPDSSSGVGKSGKQPARKRLNFGQTGDSESVPDPQPLGEPPAAPTSLGSNTMASGGGAPMADNNEGADGVGNSSGNWHCDSQWLGDRVITTSTRTWALPTYNNHLYKQISGQSGASNDNHYFGYSTPWGYFDFNRFHCHFSPRDWQRLINNNWGFRPKKLSFKLFNIQVKEVTQNDGTTTIANNLTSTVQVFTDSEYQLPYVLGSAHQGCLPPFPADVFMVPQYGYLTLNNGSQAVGRSSFYCLEYFPSQMLRTGNNFQFSYTFEDVPFHSSYAHSQSLDRLMNPLIDQYLYYLNRTQGTTSGTTNQSRLLFSQAGPQSMSLQARNWLPGPCYRQQRLSKTANGNNNSNFPWTAASKYHLNGRDSLVNPGPAMASHKDDEEKFFPMHGNLIFGKEGTTASNAELDNVMITDEEEIRTTNPVATEQCGTVANNLQSSNTAPTTRTVNDQGALPGMVWQDRDVYLQGPIWAKIPHTDGHFHPSPLMGGFGLKHPPPQIMIKNTPVPANPPTTFSPAKFASFITQYSTGQVSVEIEWELQKENSKRWNPEIQYTSNYNKSVNVDFTVDTNGVYSEPRPIGTRYLTRNL

SEQ ID NO: 1189 - protein, 736 aa, synthetic construct
  source 1..736: note = Description of Artificial Sequence: Synthetic polypeptide
MAADGYLPDWLEDNLSEGIREWWALKPGVPQPKANQQHQDNRRGLVLPGYKYLGPGNGLDKGEPVNEADAAALEHDKAYDQQLKAGDNPYLKYNHADAEFQERLQEDTSFGGNLGRAVFQAKKRILEPLGLVEGAAKTAPGKKRPVDQSPQEPDSSSGVGKSGKQPARKRLNFGQTGDSESVPDPQPLGEPPAAPTSLGSNTMASGGGAPMADNNEGADGVGNSSGNWHCDSQWLGDRVITTSTRTWALPTYNSHLYKQISSQSGASNDNHYFGYSTPWGYFDFNRFHCHFSPRDWQRLINNNWGFRPKKLSFKLFNIQVKEVTQNDGTTTIANNLTSTVQVFTDSEYQLPYVLGSAHQGCLPPFPADAFMVPQYGYLTLNNGSQAVGRSSFYCLEYFPSQMLRTGNNFQFSYTFEDVPFHGSYAHSQSLDRLMNPLIDQYLYYLNRTQGTTSGTTNQSRLLFSQAGPQSMSLQARNWLPGPCYRQQRLSKTANDNNNSNFPWTAASKYHLNGRDSLVNPGPAMASHKDDEEKFFPMHGNLIFGKEGTTASNAELDNVMITDEEEIRTTNPVATEQYGTVANNLQSSNTAPTTRTVNDQGALPGMVWQDRDVYLQGPIWAKIPHTDGHFHPSPLMGGFGLKHPPPQIMIKNTPVPANPPTTFSPAKFASFITQYSTGQVSVEIEWELQKENSKRWNPEIQYTSNYNKSVNVDFTVDTNGVYSEPRPIGTRYLTRNS

SEQ ID NO: 1190 - protein, 736 aa, synthetic construct
  source 1..736: note = Description of Artificial Sequence: Synthetic polypeptide
MAADGYLPDWLEDNLSEGIREWWALKPGVPQPKANQQHQDNRRGLVLPGYKYLGPGNGLDKGEPVNEADAAALEHDKAYDQQLKAGDNPYLKYNHADAEFQERLQEDTSFGGNLGRAVFQAKKRILEPLGLVEGAAKTAPGKKRPVDQSPQEPDSSSGVGKSGKQLARKRLNFGQTGDSESVPDPQPLGEPPAAPTSLGSNTMASGGGAPMADNNEGADGVGNSSGNWHCDSQWLGDRVITTSTRTWALPTYNSHLYKQISGQSGASNDNHYFGYSTPWGYFDFNRFHCHFSPRDWQRLINNNWGFRPKKLSFKLFNIQVKEVTQNDGTTTIANNLTSTVQVFTDSEYQLPYVLGSAHQGCLPPFPADVFMVPQYGYLTLNNGSQAVGRSSFYCLEYFPSQMLRTGNNFQFSYTFEDVPFHSSYAHSQSLDRLMNPLIDQYLYYLNRTQGTTSGTTNQSRLLFSQAGPQSMSLQARNWLPGPCYRQQRLSKTANDNNNSNFPWTAASKYHLNGRDSLVNPGPAMASHKDDEEKFFPMHGNLIFGKEGTTASNAELDNVMITDEEEIRTTNPVATEQYGTVANNLQSSNTAPTTRTVNDQGALPGMVWQDRDVYLQGPIWAKIPHTDGHFHPSPLMGGFGLKHPPPQIMIKNTPVPANPPTTFSPAKFASFITQYSTGQVSVEIEWELQKENSKRWNPEIQYTSNYNKSVNVDFTVDTNGVYSEPRPIGTRYLTRNL

SEQ ID NO: 1191 - protein, 736 aa, synthetic construct
  source 1..736: note = Description of Artificial Sequence: Synthetic polypeptide
MAADGYLPDWLEDNLSEGIREWWALKPGVPQPKANQQHQDDRRGLVLPGYKYLGPGNGLDKGEPVNEADAAALEHDKAYDQQLKAGDNPCLKYNHADAEFQERLQEDTSFGGNLGRAVFQAKKRILEPLGLVEEAAKTAPGKKRPVDQSPQEPDSSSGVGKSGKQPARKRLNFGQTGDSESVPDPQPLGEPPAAPTSLGSNTMASGGSAPMADNNEGADGVGNSSGNWHCDSQWLGDRVITTSTRTWALPTYNNHLYKQISSQSGASNDNHYFGYSTPWGYFDFNRFHCHFSPRDWQRLINNNWGFRPKKLSFKLFNIQVKEVTQNDGTTTIANNLTSTVQVFTDSEYQLPYVLGSAHQGCLPPFPADVFMVPQYGYLTLNNGSQAVGRSSFYCLEYFPSQMLRTGNNFQFSYTFEDVPFHSSYAHSQSLDRLMDPLIDQYLYYLNRTQGTTSGTTNQSRLLFSQAGPQSMSLQARNWLPGPCYRQQRLSKTANDNNNSNFPWTAASKYHLNGRDSLVNPGPAMASHKDDEEKFFPMHGNLIFGKEGTTASNAELDNVMITDEEEIRTTNPVATEQYGTVANNLQSSNTAPTTRTVNDQGALPGMVWQDRDVYLQGPIWAKIPHTDGHFHPSPLMGGFGLKHPPPQIMIKNTPVPANPPTTFSPAKFASFITQYSTGQVSVEIEWELQKENSKRWNPEIQYTSNYNKSVNVDFTVDTNGVYSEPRPIGTRYLTRNL

SEQ ID NO: 1192 - protein, 736 aa, synthetic construct
  source 1..736: note = Description of Artificial Sequence: Synthetic polypeptide
MAADGYLPDWLEDNLSEGIREWWALKPGVPQPKANQQHQDDRRGLVLPGYKYLGPGNGLDKGEPVNEADAAALEHDKAYDQQLKAGDNPYLKYNHADAEFQERLQEDTSFGGNLGRAVFQAKKRILEPLGLVEEAAKTAPGKKRPVDQSPQEPDSSSGVGKSGKQPARKRLNFGQTGDSESVPDPQPLGEPPAAPTSLGSNTMASGGGAPMADNNEGADGVGNSSGNWHCDSQWLGNRVITTSTRTWALPTYNNHLYKQISSQSGASNDNHYFGYSTPWGYFDFNRFHCHFSPRDWQRLINNNWGFRPKKLSFKLFNIQVKEVTQNDGTTTIANNLTSTVQVFTDSEYQLPYVLGSAHQGCLPPFPADVFMVPQYGYLTLNNGSQAVGRSSFYCLEYFPSQMLRTGNNFQFSYTFEDVPFHSSYAHSQSLDRLMNPLIDQYLYYLNRTQGTTSGTTNQSRLLFSQAGPQSMSLQARNWLPGPCYRQQRLSKTANDNNNSNFPWTAASKYHLNGRDSLVNPGPAMASHKDDEEKFFPMHGNLIFGKEGTTASNAELDNVMITDEEEIRTTNPVATEQYGTVANNLQSSNTAPTTRTVNDQGALPGMVWQDRDVYLQGPIWAKIPHTDGHFHPSPLMGGFGLKHPPPQIMIKNTPVPANPPTTFSPAKFASFITQYSTGQVSVEIEWELQKENSKRWNPEIQYTSNYNKSVNVDFTVDTNGVYSEPRPIGTRYLTRNL

SEQ ID NO: 1193 - protein, 736 aa, synthetic construct
  source 1..736: note = Description of Artificial Sequence: Synthetic polypeptide
MAADGYLPDWLEDNLSEGIREWWALKPGVPQPKANQQHQDDRRGLVLPGYKYLGPGNGLDKGEPVNEADAAALEHDKAYDQQLKAGDNPYLKYNHADAEFQERLQEDTSFGGNLGRAVFQAKKRILEPLGLVEEAAKTAPGKKRPVDQSPQEPDSSSGVGKSGKQPARKRLNFGQTGDSESVPDPQPLGEPPAAPTSLGSNTMASGGGAPMADNNEGADGVGNSSGNWHCDSQWLGDRVITTSTRTWALPTYNNHLYKQISSQSGASNDNHYFGYSTPWGYFDFNRFHCHFSPRDWQRLINNNWGFRPKKLSFKLFNIQVKEVTQNDGTTTIANNLTSTVQVFTDSEYQLPYVLGSAHQGCLPPFPADVFMVPQYGYLTLNNGSQAVGRSSFYCLEYFPSQMLRTGNNFQFSYTFEDVPFHSSYAHSQSLDRLMNPLIDQYLYYLNRTQGTTSGTTNQSRLLFSQAGPQSMSLQARNWLPGPCYRQQRLSKTANDNNNSNFPWTAASKYHLNGRDSLVNPGPAMASHKDDEEKFFPMHGNLIFGKEGTTASNAELDNVMITDEEEIRTTNPVATVQYGTVANNLQSSNTAPTTRTVNDQGALPGMVWQDRDVYLQGPIWAKIPHTDGHFHPSPLMGGFGLKHPPPQIMIKNTPVPANPPTTFSPAKFASFITQYSTGQVSVEIEWELQKENSKRWNPEIQYTSNYNKSVNVDFTVDTNGVYSEPRPIGTRYLTRNL

SEQ ID NO: 1194 - protein, 735 aa, synthetic construct
  source 1..735: note = Description of Artificial Sequence: Synthetic polypeptide
MAADGYLPDWLEDNLSEGIREWWALKPGVPQPKANQQHQDNRRGLVLPGYKYLGPGNGLDKGEPVNEADAAALEHDKAYDQQLKAGDNPYLKYNHADAEFQERLQEDTSFGGNLGRAVFQAKKGILEPLGLVEEAAKTAPGKKRPVDQSPQEPDSSSGVGKSGKQPARKRLNFGQTGDSESVPDPQPLGEPPAAPTSLGSNTMASGGGAPMADNNEGADGVGNSSGNWHCDSQWLGDRVITTSTRTWALPTYNNHLYKQISSQSGASNDNHYFGYSTPWGYFDFNRFHCHFSPRDWQRLINNNWGFRPKKLSFKLFNIQVKEVTQNDGTTTIANNLTSTVQVFTDSEYQLPYVFGSAHQGCLPPFPADVFMVPQYGYLTLNNGSQAVGRSSFYCLEYFPSQMLRTGNNFQFSYTFEDVPFHSSYAHSQSSDRLMNPLIDQYLYYLNRTQGTTSGTTNQSRLLFSQAGPQSMSLQARNWLPGPCYRQQRLSKTANDNNNSNFPTAASKYHLNGRDSLVNPGPAMASHKDDEEKFFPMHGNLIFGKEGTTASNAELDNVMITDEEEIRTTNPVATEQYGTVANNLQSSNTAPTTRTVNDQGALPGMVWQDRDVYLQGPIWAKIPHTDGHFHPSPLMGGFGLKHPPPQIMIKNTPVPANPPTTFSPAKFASFITQYSTGQVSVEIEWELQKENSKRWNPEIQYTSNYNKSVNVDFTVDTNGVYSEPRPIGTRYLTRNL

SEQ ID NO: 1195 - protein, 736 aa, synthetic construct
  source 1..736: note = Description of Artificial Sequence: Synthetic polypeptide
MAADGYLPDWLEDNLSEGIREWWALKPGVPQPKANQQHQDNRRGLVLPGYKYLGPGNGLDEGEPVNEADAAALEHDKAYDQQLKAGDNPYLKYNHADAEFQERLQEDTSFGGNLGRAVFQAKKRILEPLGLVEGAAKTAPGKKRPVDQSPQEPDSSSGVGKSGKQPARKRLNFGQTGDSESVPDPQPLGEPPAAPTSLGSNTMASGGGAPMADNNEGADGVGNSSGNWHCDSQWLGDRVITTSTRTWALPTYNSHLYKQISSQSGASNDNHYFGYSTPWGYFDFNRFHCHFSPRDWQRLINNNWGFRPKKLSFKLFNIQVKEVTQNDGTTTIANNLTSTVQVFTDSEYQLPYVLGSAHQGCLPPFPADVFMVPQYGYLTLNNGSQAVGRSSFYCLEYFPSQMLRTGNNFQFSYTFEDVPFHSSYAHSQSLDRLMNPLIDQYLYYLNRTQGTTSGTTNQSRLLFSQAGPQSMSLQARNWLPGPCYRQQRLSKTANDNNNSNFPWTAASKYHLNGRDSLVNPGPAMASHKDDEEKFFPMHGNLIFGKEGTTASNAELDNVMITDEEEIRTTNPVATEQYGTVANNLQSSNTAPTTRTVNDQGALPGMVWQDRDVYLQGPIWAKIPHTDGHFHPSPLMGGFGLKHPPPQIMIKNTPVPANPPTTFSPAKFASFITQYSTGQVSVEIEWELQKENSKRWNPEIQYTSNYNKSVNVDFTVDTNGVYSEPRPIGTRYLTRNL

SEQ ID NO: 1196 - protein, 668 aa, synthetic construct
  source 1..668: note = Description of Artificial Sequence: Synthetic polypeptide
MAADGYLPDWLEDNLSEGIREWWALKPGVPQPKANQQHQDNRRGLVLPGYKYLGPGNGLDKGEPVNEADAAALEHDKAYDQQLKAGDNPYLKYNHADAEFQERLQEDTSFGGNLGRAVFQAKKRILEPLGLVEGAAKTAPGKKRPVDQSPQEPDSSSGVGKSGKQPARKRLNFGQTGDSESVPDPQPLGEPPAAPTSLGSNTMASGGGAPMADNNEGADGVGNSSGNWHCDSQWLGDRVITTSTRTWALPTYNSHLYKQISSQSGASNDNHYFGYSTPWGILTLTDSTATSHHVTGSDSLTTTGDSGPRNSASSSSTSKLKRSRRTMARRLLPITLPARFKCLRTRSISSRTCSGRRTKAVSRRFQRTPSWSLSMDTSPTTEVKRWDAHPFTAWSTSLRRCGLEITSNSAIPSRMYLFTAATLTARVWIAILLLISICTTTERKEQPLEQPTNHGCFLARLGLSLCLCRPEIGYLGPATGNRDFQRLLTTTTTVTFLGQRPANIISMAATRWIQDQLWPVTRTMKKNFSLCTAIRGPYLAWCGKIVTCTFKDLSGQRFLTRMDTFILLLWEALDNIRLLKSSKILRYRQILRRLSARPSLLHLSLSTPLDRSAWKLSGSYRKKTANVGIQRFSTLPTTTSLLMWTLLTLMVFIVNLALLEPGISHETC

SEQ ID NO: 1197 - protein, 734 aa, synthetic construct
  source 1..734: note = Description of Artificial Sequence: Synthetic polypeptide
MTDGYLPDWLEDNLSEGVREWWALQPGAPKPKANQQHQDNARGLVLPGYKYLGPGNGLDKGEPVNAADAAALEHDKAYDQQLKAGDNPYLKYNHADAEFQQRLQGDTSFGGNLGRAVFQAKKRVLEPLGLVEQAGETAPGKKRPLIESPQQPDSSTGIGKKGKQPAKKKLVFEDETGAGDGPPEGSTSGAMSDDSEMRAATGGAAVEGGQGADGVGNASGDWHCDSTWSEGHVTTTSTRTWVLPTYNNHLYKRLGESLQSNTYNGFSTPWGYFDFNRFHCHFSPRDWQRLINNNWGMRPKAMRVKIFNIQVKEVTTSNGETTVANNLTSTVQIFADSSYELPYVMDAGQEGSLPPFPNDVFMVPQYGYCGLVTGNTSQQQTDRNAFYCLEYFPSQMLRTGNNFEITYSFEKVPFHSMYAHSQSLDRLMNPLIDQYLWGLQSTTTGTTLNAGTATTNFTKLRPTNLSNFKKNWLPGPSIKQQGFSKTANQNYKIPATGSDSLIKYETHSTLDGRWSALTPGPPMATAGPADSKFSNSQLIFAGPKQNGNTATVPGTLIFTSEEELAATNATDTDMWGNLPGGDQSNSNLPTVDRLTALGAVPGMVWQNRDIYYQGPIWAKIPHTDGHFHPSPLIGGFGLKHPPPQIFIKNTPVPANPATTFSSTPVNSFITQYSTGQVSVQIDWEIQKERSKRWNPEVQFTSNYGQQNSLLWAPDAAGKYTEPRAIGTRYLTHHL

SEQ ID NO: 1198 - protein, 734 aa, synthetic construct
  source 1..734: note = Description of Artificial Sequence: Synthetic polypeptide
MTDGYLPDWLEDNLSEGVREWWALQPGAPKPKANQQHQDNARGLVLPGYKYLGPGNGLDKGEPVNAADAAALEHDKAYDQQLKAGDNPYLKYNHADAEFQQRLQGDTSFGGNLGRAVFQAKKRVLEPLGLVEQAGETAPGKKRPLIESPQQPDSSTGIGKKGKQPAKKKLVFEDETGAGDGPPEGSTSGAMSDDSEMRAAAGGAAVEGGQGADGVGNASGDWHCDSTWSEGHVTTTSTRTWVLPTYNNHLYKRLGESLQSNTYNGFSTPWGYFDFNRFHCHFLPRDWQRLINNNWGVRPKAMRVKIFNIQVKEVTTSNGETTVANNLTSTVQIFADSSYELPYVMDAGQEGSLPPFPNDVFMVPQYGYCGLVTGDTSQQQTDRNAFYCLEYFPSQMLRTGNNFEITYSFEKVPFHSMYAHSQSLDRLMNPLIDQYLWGLQSTTTGTTLNAGTATTNFTKLRPTNFSNFKKNWLPGPSIKQQGFSKTANQNYKIPATGSDSLIKYETHSTLDGRWSALTPGPPMATAGPADSKFSNSQLIFAGPKQNGNTATVPGTLIFTSEEELAATNATDTDMWGNLPGGDQSNSNLPTVDRLTALGAVPGMVWQNRDIYYQGPIWAKIPHTDGHFHPSPLIGGFGLKHPPPQIFIKNTPVPANPATTFSSTPVNSFITQYSTGQVSVQIDWEIQKERSKRWNPEVQFTSNYGQQNSLLWAPDAAGKYTEPRAIGTRYLTHHL

SEQ ID NO: 1199 - protein, 734 aa, synthetic construct
  source 1..734: note = Description of Artificial Sequence: Synthetic polypeptide
MTDGYLPDWLEDNLSEGVREWWALQPGAPKPKANQQHQDNARGLVLPGYKYLGPGNGLDEGEPVNAADAAALEHDKAYDQQLKAGDNPYLKYNHADAEFQQRLQGDTSFGGNLGRAVFQAKKRVLEPLGLVEQAGETAPGKKRPLIESPQQPDSSTGIGKKGKQPAKKKLVFEDETGAGDGPPEGSTSGAMSDDSEMRAAAGGAAVEGGQGADGVGNASGDWHCDSTWSEGHVTTTSTRTWVLPTYNNHLYKRLGESLQSNTYNGFSTPWGYFDFNRFHCHFSPRDWQRLINNNWGMRPKAMRVKIFNIQVKEVTTSNGETTVANNLTSTVQIFADSSYELPYVMDAGQEGSLPPFPNDVFMVPQYGYCGLVTGNTSQQQTDRNAFYCLEYFPSQMLRTGNNFEITYSFEKVPFHSMYAHSQSLDRLMNPLIDQYLWGLQSTTTGTTLNAGTATTNFTKLRPTNFSNFKKNWLPGPSIKQQGFSKTANQNYKIPATGSDSLIKYETHSTLDGRWSALTPGPPMATAGPADSKFSNSQLIFAGPKQNGNTATVPGTLIFTSEEELAATNATDTDMWGNLPGGDQSNSNLPTVDRLTALGAVPGMVWQNRDIYYQGPIWAKIPHTDGHFHPSPLIGGFGLKHPPPQIFIKNTPVPANPATTFSSTPVNSFITQYSTGQVSVQIDWEIQKERSKRWNPEVQFTSNYGQQNSLLWAPDAAGKYTEPRAIGTRYLTHHL

SEQ ID NO: 1200 - protein, 734 aa, synthetic construct
  source 1..734: note = Description of Artificial Sequence: Synthetic polypeptide
MTDGYLPDWLEDNLSEGVREWWALQPGAPKPKANQQHQDNARGLVLPGYKYLGPGNGLDKGEPVNAADAAALEHDKAYDQQLKAGDNPYLKYNHADAEFQQRLQGDTSFGGNLGRAVFQAKKRVLEPLGLVEQAGETAPGKKRPLIESPQQPDSSTGIGKKGKQPAKKKLVFEDGTGAGDGPPEGSTSGAMSDDSEMRAAAGGAAVEGGQGADGVGNASGDWHCDSTWSEGHVTTTSTRTWVLPTYNNHLYKRLGESLQSNTYNGFPTPWGYFDFNRFHCHFSPRDWQRLINNNWGMRPKAMRVKIFNIQVKEVTTSNGETTAANNLTSTVQIFADSSYELPYVMDAGQEGSLPPFPNDVFMVPQYGYCGLVTGNTSQQQTDRNAFYCLEYFPSQMLRTGNNFEITYSFEKVPFHSMYAHSQSLDRLMNPLIDQYLWGLQSTTTGTTLNAGTATTNFTKLRPTNFSNFKKNWLPGPSIKQQGFSKTANQNYKIPATGSDSLIKYETHSTLDGRWSALTPGPPMATAGPADSKFSNSQLIFAGPKQNGNTATVPGTLIFTSEEELAATNATDTDMWGNLPGGDQSNSNLPTVDRLTALGAVPGMVWQNRDIYYQGPIWAKIPHTDGHFHPSPLIGGFGLKHPPPQIFIKNTPVPANPATTFSSTPVNSFITQYSTGQVSVQIDWEIQKERSKRWNPEVQFTSNYGQQNSLLWAPDAAGKYTEPRAIGTRYLTHHL

SEQ ID NO: 1201 - protein, 734 aa, synthetic construct
  source 1..734: note = Description of Artificial Sequence: Synthetic polypeptide
MTDGYLPDWLEDNLSEGVREWWALQPGAPKPKANQQHQDNARGLVLPGYKYLGPGNGLDKGEPVNAADAAALEHDKAYDQQLKAGDNPYLKYNHADAEFQQRLQGDTSFGGNLGRAVFQAKKRVLEPLGLVEQAGETAPGKKRPLIESPQQPDSSTGIGKKGKQPAKKKLVFEDETGAGDGPPEGSTSGAMSDDSEMRAAAGGAAVEGGQGADGVGNASGDWHCDSTWSEGHVTTTSTRTWVLPTYNNHLYKRLGESLQSNTYNGFSTPWGYFDFNRFHCHFSPRDWQRLINNNWGMRPKAMRVKIFNIQVKEVTTSNGETTVANNLTSTVQIFADSSYELPYVMDAGQEGSLPPFPNDVFMVPQYGYRGLVTGNTSQQQTDRNAFYCLEYFPSQMLRTGNNFEITYSFEKVPFHSMYAHSQSLDRLMNPLIDQYLWGLQSTTTGTTLNAGTATTNFTKLRPTNFSNFKKNWLPGPSIKQQGFSKTANQNYKIPATGSDSLIKYETHSTLDGRWSALTPGPPMATAGPADSKFSNSQLIFAGPKQNGNTATVPGTLIFTSEEELAATNATDTDMWGNLPGGDQSNSNLPTVDRLTALGAVPGMVWQNRDIYYQGPIWAKIPHTDGHFHPSPLIGGFGLKHPPPQIFIKNTPVPANPATTFSSTPVNSFITQYSTGQVSVQIDWEIQKERSKRWNPEVQFTSNYGQQNSLLWAPDAAGKYTEPRAIGTRYLTHHL

SEQ ID NO: 1202 - protein, 734 aa, synthetic construct
  source 1..734: note = Description of Artificial Sequence: Synthetic polypeptide
MTDGYLPDWLEDNLSEGVREWWALQPGAPKPKANQQHQDNARGLVLQGYKYLGPGNGLDKGEPVNAADAAALEHDKAYDQQLKAGDNPYLKYNHADAEFQQRLQGDTSFGGNLGRAVFQAKKRVLEPLGLVEQAGETAPGKKRPLIESPQQPDSSTGIGKKGKQPAKKKLVFEDETGAGDGPPEGSTSGAMSDDSEMRAAAGGAAVEGGQGADGVGNASGDWHCDSTRSEGHVTTTSTRTWVLPTYNNHLYKRLGESLQSNTYNGFSTPWGYFDFNRFHCHFSPRDWQRLINNNWGMRPKAMRVKIFNIQVKEVTTSNGETTVANNLTSTVQIFADSSYELPYVMDAGQEGSLPPFPNDVFMVPQYGYCGLVTGNTSQQQTDRNAFYCLEYFPSQMLRTGNNFEITYSFEKVPFHSMYAHSQSLDRLMNPLIDQYLWGLQSTTTGTTLNAGTATTNFTKLRPTNFSNFKKNWLPGPSIKQQGFSKTANQNYKIPATGSDSLIKYETHSTLDGRWSARTPGPPMATAGPADSKFSNSQLIFAGPKQNGNTATVPGTLIFTSEEELAATNATDTDMWGNLPGGDQSNSNLPTVDRLTALGAVPGMVWQNRDIYYQGPIWAKIPHTDGHFHPSPLIGGFGLKHPPPQIFIKNTPVPANPATTFSSTPVNSFITQYSTGQVSVQIDWEIQKERSKRWNPEVQFTSNYGQQNSLLWAPDAAGKYTEPRAIGTRYLTHHL

SEQ ID NO: 1203 - protein, 724 aa, synthetic construct
  source 1..724: note = Description of Artificial Sequence: Synthetic polypeptide
MSFVDHPPDWLEEVGEGLREFLGLEAGPPKPKPNQQHQDQARGLVLPGYNYLGPGNGLDRGEPVNRADEVAREHDISYNEQLEAGDNPYLKYNHADAEFQERLADDTSFGGNLGKAVFQAKKRVLEPFGLVEEGAKTAPTGKRIDDHFPKRKKARTEEDSKPSTSSDAEAGPSGSQQLQIPAQPASSLGADTMSAGGGGPLGDNNQGADGVGNASGDWHCDSTWMGDRVVTKSTRTWVLPSYNNHQYREIKSGSVDGSNANAYFGYSTPWGYFDFNRFHSHWSPRDWQRLINNYWGFRPRSLRVKIFNIQVKEVTVQDSTTTIANNLTSTVQVFTDDDYQLPYVVGNGTEGCLPAFPPQVFTLPQYGYATLNRDNTENPTERSSFFCLEYFPSKMLRTGNNFEFTYNFEEVPFHSSFAPSQNLFKLANPLVDQYLYRFVSTNNTGGVQFNKNLAGRYANTYKNWFPGPMGRTQGWNLGSGVNRASVSAFATTNRMELEGASYQVPPQPNGMTNNLQGSNTYALENTMIFNSQPANPGTTATYLEGNMLITSESETQPVNRVAYNVGGQMATNNQSSTTAPATGTYNLQEIVPGSVWMERDVYLQGPIWAKIPETEAHFHPSPAMGGFGLKHPPPMMLIKNTPVPGNITSFSDVPVSSFITQYSTGQVTVEMEWELKKENSKRWNPEIQYTNNYNDPQFVDFAPDSTGEYRTTRPIGTRYLTRPL

SEQ ID NO: 1204 - protein, 724 aa, synthetic construct
  source 1..724: note = Description of Artificial Sequence: Synthetic polypeptide
MSFVDHPPDWLEEVGEGLREFLGLEAGPPKPKPNQQHQDQARGLVLPGYNYLGPGNGLDRGEPVNRADEVAREHDISYNEQLEAGDNPYLKYNHADAEFQEKLADDTSSGGNLGKAVFQAKKRVLEPFGLVEEGAKTAPTGKRIDDHFPKRKKARTEEDSKPSTSSDAEAGPSGSQQLQIPAQPASSLGADTMSAGGGGPLGDNNQGADGVGNASGDWHCDSTWMGDRVVTKSTRTWVLPSYNNHQYREIKSGSVDGSNANAYFGYSTPWGYFDFNRFHSHWSPRDWQRLINNYWGFRPRSLRVKIFNIQVKEVTVQDSTTTIANNLTSTVQVFTDDDYQLPYVVGNGTEGCLPAFPPQVFTLPQYGYATLNRDNTENPTERSSFFCLEYFPSKMLRTGNNFEFTYNFEEVPFHSSFAPSQNLFKLANPLVDQYLYRFVSTNNTGGVQFNKNLAGRYANTYKNWFPGPMGRTQGWNLGSGVNRASVSAFATTNRMELEGASYQVPPQPNGMTNNLQGSNTYALENTMIFNSQPANPGTTATYLEGNMLITSESETQPVNRVAYNVGGQMATNNQSSTTAPATGTYNLQEIVPGSVWMERDVYLQGPIWAKIPETGAHFHPSPAMGGFGLKHPPPMMLIKNTPVPGNITSFSDVPVSSFITQYSTGQVTVEMEWELKKENSKRWNPEIQYTNNYNDPQFVDFAPDSTGEYRTTRPIGTRYLTRPL

SEQ ID NO: 1205 - protein, 724 aa, synthetic construct
  source 1..724: note = Description of Artificial Sequence: Synthetic polypeptide
MSFVDHPPDWLEEVGEGLREFLGLEAGPPKPKPNQQHQDQARGLVLPGYNYLGPGNGLDRGEPVNRADEVAREHDISYNEQLEAGDNPYLKYNHADAEFQEKLADDTSFGGNLGKAVFQAKKRVLEPFGLVEEGAKTAPTGKRIDDHFPKRKKARTEEDSKPSTSSDAEAGPSGSQQLQIPAQPASSLGADTMSAGGGGPLGDNNQGADGVGNASGDWHCDSTWMGDRVVTKSTRTWVLPSYNNHQYREIKSGSVDGSNANAYFGYSTPWGYFDFNRFHSHWSPRDWQRLINNYWGFRPRSLRVKIFNIQVKEVTVQDSTTTIANNLTSTVQVFTDDDYQLPYVVGNGTEGCLPAFPPQVFTLPQYGYATLNRDNTENPTERSSFFCLEYFPSKMLRTGNNFEFTYNFEEVPFHSSFAPSQNLFKLANPLVDQYLYRFVSTNNTGGVQFNKNLAGRYANTYKNWFPGPMGRTQGWNLGSGVNRASVSAFATTNRMELEGASYQVPPQPNGMTNNLQGSNTYALENTMIFNSQPANPGTTATYLEGNMLITSESETQPVNRVAYNVGGQMATNNQSSTTAPATGTYNLQEIVPGSVWMERDVYLQGPIWAKIPETGAHFHPSPAMGGFGLKHPPPMMLIKSTPVPGNITSFSDVPVSSFITQYSTGQVTVEMEWELKKENSKRWNPEIQYTNNYNDPQFVDFAPDSTGEYRTTRPIGTRYLTRPL

SEQ ID NO: 1206 - protein, 724 aa, synthetic construct
  source 1..724: note = Description of Artificial Sequence: Synthetic polypeptide
MSFVDHPPDWLEEVGEGLREFLGPEAGPPKPKPNQQHQDQARGLVLPGYNYLGPGNGLDRGEPVNRADEVAREHDISYNEQLEAGDNPYLKYNHADAEFQEKLADDTSFGGNLGKAVFQAKKRVLEPFGLVEEGAKTAPTGKRIDDHFPKRKKVRTEEDSKPSTSSDAEAGPSGSQQLQIPAQPASSLGADTMSAGGGGPLGDNNQGADGVGNASGDWHCDSTWMGDRVVTKSTRTWVPPSYNNHQYREIKSGSVDGSNANAYFGYSTPWGYFDFNRFHSHWSPRDWQRLINNYWGFRPRSLRVKIFNIQVKEVTVQDSTTTIANNLTSTVQVFTDDDYQLPYVVGNGTEGCLPAFPPQVFTLPQYGYATLNRDNTENPTERSSFFCLEYFPSKMLRTGNNFEFTYNFEEVPFHSSFAPSQNLFKLANPLVDQYLYRFVSTNNTGGVQFNKNLAGRYANTYKNWFPGPMGRTQGWNLGSGVNRASVSAFATTNRMELEGASYQVPPQPNGMTNNLQGSNTYALENTMIFNSQPANPGTTATYLEGNMLITSESETQPVNRVACNVGGQMATNNQSSTTAPATGTYNLQEIVPGSVWMERDVYLQGPIWAKIPETGAHFHPSPAMGGFGLKHPPPMMLIKNTPVPGNITSFSDVPVSSFITQYSTGQVTVEMEWELKKENSKRWNPEIQYTNNYNDPQFVDFAPDSTGEYRTTRPIGTRYLTRPL

SEQ ID NO: 1207 - protein, 724 aa, synthetic construct
  source 1..724: note = Description of Artificial Sequence: Synthetic polypeptide
MSFVDHPPDWLEEVGEGLREFLGLEAGPPKPKPNQQHQDQARGLVLPGYNYLGPGNGLDRGEPVNRADEVAREHDISYNEQLEAGDNPYLKYNHADAEFQEKLADDTSFGGNLGKAVFQAKKRVLEPFGLVEEGAKTAPTGKRIDDHFPKRKKARTEEDSKPSTSSDAEAGPSGSQQLQIPAQPASSLGADTMSAGGGGPLGDNNQGADGVGNASGDWHCDSTWMGDRVVTKSTRTWVLPSYNNHQYREIKSGSVDGSNANAYFGYSTPWGYFDFNRFHSHWSPRDWQRLINNYWGFRPRSLRVKIFNIQVKEVTVQDSTTTIANNLTSTVQVFTDDDYQLPYVVGNGTEGCLPAFPPQVFTLPQYGYATLNRDNTENPTERSSFFCLEYFPSKMLRTGNNFEFTYNFEEVPFHSSFAPSQNLFKLANPLVDQYLYRFVSTNNTGGVQFNKNLAGRYANTYKNWFPGPMGRTQGWNLGSGVNRASVSAFATTNRMELEGASYQVPPQPNGMTNNLQGSNTYALENTMIFNSQPANPGTTATYLEGNMLITSESETQPVNRVAYNVGGQMATNNQSSTTAPATGAYNLQEIVPGSVWMERDVYLQGPIWAKIPETGAHFHPSPAMGGFGLKHPPPMMLIKNTPVPGNITSFSDVPVSSFITQYSTGQVTVEMEWELKKENSKRWNPEIQYTNNYNDPQFVDFAPDSTGEYRTTRPIGTRYLTRPL

SEQ ID NO: 1208 - protein, 724 aa, synthetic construct
  source 1..724: note = Description of Artificial Sequence: Synthetic polypeptide
MSFVDHPPDWLEEVGEGLREFLGLEAGPPKPKPNQQHQDQARGLVLPGYNYLGPGNGLDRGEPVNRADGVAREHDISYNEQLEAGDNPYLKYNHADAEFQEKLADDTSFGGNLGKAVFQAKKRVLEPFGLVEEGAKTAPTGKRIDDHFPKRKKARTEEDSKPSTSSDAEAGPSGSQQLQIPAQPASSLGADTMSAGGGGPLGDNNQGADGVGNASGDWHCDSTWMGDRVVTKSTRTWVLPSYNNHQYREIKSGSVDGSNANAYFGYSTPWGYFDFNRFHSHWSPRDWQRLINNYWGFRPRSLRVKIFNIQVKEVTVQDSTTTIANNLTSTVQAFTDDDYQLPYVVGNGTEGCLPAFPPQVFTLPQYGYATLNRDNTENPTERSSFFCLEYFPSKMLRTGNNFEFTYNFEEVPFHSSFAPSQNLFKLANPLVDQYLYRFVSTNNTGGVQFNKNLAGRYANTYKNWFPGPMGRTQGWNLGSGVNRASVSAFATTNRMELEGASYQVPPQPNGMTNNLQGSNTYALENTMIFNSQPANPGTTATYLEGNMLITSESETQPVNRVAYNVGGQMATNNQSSTTAPATGTYNLQEIVPGSVWMERDVYLQGPIWAKIPETGAHFHPSPAMGGFGLKHPPPMMLIKNTPVPGNITSFSDVPVSSFITQYSTGQVTVEMEWELKKENSKRWNPEIQYTNNYNDPQFVDFAPDSTGEYRTTRPIGTRYLTRPL

SEQ ID NO: 1209 - protein, 723 aa, synthetic construct
  source 1..723: note = Description of Artificial Sequence: Synthetic polypeptide
MSFVDHPPDWLEEVGEGLREFLGLEAGPPKPKPNQQHQDQARGLVLPGYNYLGPGNGLDRGEPVNRADEVAREHDISYNEQLEAGDNPYLKYNHADAEFQEKLADDTSFGGNLGKAVFQAKKRVLEPFGLVEEGAKTAPTGKRIDDHFPKRKKARTEEDSKPSTSSDAEAGPSGSQQLQIPAQPASSLGADTMSAGGGGPLGDNNQGADGVGNASGDWHCDSTWMGDRVVTKSTRTWVLPSYNNHQYREIKSGSVDGSNANAYFGYSTPWGYFDFNRFHSHWSPRDWQRLINNYWGFRPRSLRVKIFNIQVKEVTVQDSTTTIANNLTSTVQVFTDDDYQLPYVVGNGTEGCLPAFPPQVFTLPQYGYATLNRDNTENPTERSSFFCLEYFPSKMLRTGNNFEFTYNFEEVPFHSSFAPSQNLFKLANPLVDQYLYRFVSTNNTGGVQFNKNLAGRYANTYKNWFPGPMGRTQGWNLGSGVNRASVSAFATTNRMELEGASYVPPQPNGMTNNLQGSNTYALENTMIFNSQPANPGTTATYLEGNMLITSESETQPVNRVAYNVGGQMATNNQSSTTAPATGTYNLQEIVPGSVWMEGDVYLQGPIWAKIPETGAHFHPSPAMGGFGLKHPPPMMLIKNTPVPGNITSFSDVPVSSFITQYSTGQVTVEMEWELKKENSKRWNPEIQYTNNYNDPQFVDFAPDSTGEYRTTRPIGTRYLTRPL

SEQ ID NO: 1210 - protein, 724 aa, synthetic construct
  source 1..724: note = Description of Artificial Sequence: Synthetic polypeptide
MSFVDHPPDWLEEVGEGLREFLGLEAGPPKPKPNQQHQDQARGLVLPGYNYLGPGNGLDRGEPVNRADEVAREHDISYNEQLEAGDNPYLKYNHADAEFQEKLADDTSFGGNLGKAVFQAKKRVLEPFGLVEEGAKTAPTGKRIDDHFPKRKKVRTEEDSKPSTSSDAEAGPSGSQQLQIPAQPASSLGADTMSAGGGGPLGDNNQGADGVGNASGDWHCDSTWMGDRVVTKSTRTWVLPSYNNHQYREIKSGSVDGSNANAYFGYSTPWGYFDFNRFHSHWSPRDWQRLINNYWGFRPRSLRVKIFNIQVKEVTVQDSTTTIANNLTSTVQVFTDDDYQLPYVVGNGTEGCLPAFPPQVFTLPQYGYATLNRDNTENPTERSSFFCLEYFPSKMLRTGNNFEFTYNFEEVPFHSSFAPSQNLFKLANPLVDQYLYRFVSTNNTGGVQFNKNLAGRYANTYKNWFPGPMGRTQGWNLGSGVNRASVSAFATTNRMELEGASYQVPPQPNGMTNNLQGSNTYALENTMIFNSQPANPGTTATYLEGNMLITSESETQPVNRVAYNVGGQMATNNQSSTTAPATGTYNLQEIVPGSVWMERDVYLQGPIWAKIPETGAHFHPSPAMGGFGLKHPPPMMLIKNTPVPGNITSFSDVPVSSFITQYSTGQVTVEMEWELKKENSERWNPEIQYTNNYNDPQFVDFAPDSTGEYRTTRPIGTRYLTRPL

SEQ ID NO: 1211 - protein, 724 aa, synthetic construct
  source 1..724: note = Description of Artificial Sequence: Synthetic polypeptide
MSFVDHPPDWLEEVGEGLREFLGLEAGPPKPKPNQQHQDQARGLVLPGYNYLGPGNGLDRGEPVNRADEVAREHDISYSEQLEAGDNPYLKYNHADAEFQEKLADDTSFGGNLGKAVFQAKKRVLEPFGLVEEGAKTAPTGKRIDDHFPKRKKARTEEDSKPSTSSDAEAGPSGSQQLQIPAQPASSLGADTMSAGGGGPLGDNNQGADGVGNASGDWHCDSTWMGDRVVTKSTRTWVLPSYNNHQYREIKSGSVDGSNANAYFGYSTPWGYFDFNRFHSHWSPRDWQRLINNYWGFRPRSLRVKIFNIQVKEVTVQDSTTTIANNLTSTVQVFTDDDYQLPYVVGNGTEGCLPAFPPQVFTLPQYGYATLNRDNTENPTERSSFFCLEYFPSKMLRTGNNFEFTYNFEEVPFHSSFAPSQNLFKLANPLVDQYLYRFVSTNNTGGVQFNKNLAGRYANTYKNWFPGPMGRTQGWNLGSGVNRASVSAFATTNRMELEGASYQVPPQPNGMTNNLQGSNTYALENTMIFNSQPANPGTTATYLEGNMLITSESETQPVNRVAYNVGGQMATNNQSSTTAPATGTYNLQEIVPGSVWMERDVYLQGPIWAKIPETGAHFHPSPAMGGFGLKHPPPMMLIKNTPVPGNITSFSDVPVSSFITQYSTGQVTVEMEWELKKENSKRWNPEIQYTNNYNDPQFVDFAPDSTGEYRTARPIGTRYLTRPL

SEQ ID NO: 1212 - protein, 724 aa, synthetic construct
  source 1..724: note = Description of Artificial Sequence: Synthetic polypeptide
MSFVDHPPDWLEEVGEGLREFLGPEAGPPKPKPNQQHQDQARGLVLPGYNYLGPGNGLDRGEPVNRADEVAREHDISYNEQLEAGDNPYLKYNHADAEFQEKLADDTSFGGNLGKAVFQAKKRVLEPFGLVEEGAKTAPTGKRIDDHFPKRKKARTEEDSKPSTSSDAEAGPSGSQQLQIPAQPASSLGADTMSAGGGGPLGDNNQGADGVGNASGDWHCDSTWMGDRVVTKSTRTWVLPSYNNHQYREIKSGSVDGSNANAYFGYSTPWGYFDFNRFHSHWSPRDWQRLINNYWGFRPRSLRVKIFNIQVKEVTVQDSTTTIANNLTSTVQVFTDDDYQLPYVVGNGTEGCLPAFPPQVFTLPQYGYATLNRDNTENPTERSSFFCLEYFPSKMLRTGNNFEFTYNFEEVPFHSSFAPSQNLFKLANPLVDQYLYRFVSTNNTGGVQFNKNLAGRYANTYKNWFPGPMGRTQGWNLGSGVNRASVSAFATTNRMELEGASYQVPPQPNGMTNNLQGSNTYALENTMIFNSQPANPGTTATYLEGNMLITSESETQPVNRVAYNVGGQMTTNNQSSTTAPATGTYNLQEIVPGSVWMERDVYPQGPIWAKIPETGAHFHPSPAMGGFGLKHPPPMMLIKNTPVPGNITSFSDVPVSSFITQYSTGQVTVEMEWELKKENSKRWNPEIQYTNNYNDPQFVDFAPDSTGEYRTTRPIGTRYLTRPL

SEQ ID NO: 1213 - protein, 724 aa, synthetic construct
  source 1..724: note = Description of Artificial Sequence: Synthetic polypeptide
MSFVDHPPDWLEEVGEGLREFLGLEAGPPKPKPNQQHQDQARGLVLPGYNYLGPGNGLDRGEPVNRADEVAREHDISYNEQLEAGDNPYLKYNHADAEFQEKLADDTSFGGNLGKAVFQAKKRVLEPFGLVEEGAKTAPTGKRIDDHFPKRKKARTEEDSKPSTSSDAEAGPSGSQQLQIPAQPASSLGADTMSAGGGGPLGDNNQGADGVGNASGDWHCDSTWMGDRVVTKSTRTWVLPSYNNHQYREIKSGSVDGSNANAYFGYSTPWGYFDFNRFHSHWSPRDWQRLINNYWGFRPRSLRVKIFNIQVKEVTVQDSTTTIANNLTSTVQVFTDDDYQLPYVVGNGTEGCLPAFPPQVFTLPQYGYATLNRDNTENPTERSSFLCLEYFPSKMLRTGNNFEFTYNFEEVPFHSSFAPSQNLFKLANPLVDQYLYRFVSTNNTGGVQFNKNLAGRYANTYKNWFPGPMGRTQGWNLGSGVNRASVSAFATTNRMELEGASYQVPPQPNGMTNNLQGSNTYALENTMIFNSQPANPGTTATYLEGNMLITSESETQPVNRVAYNVGGQMATNNQSSTTAPATGTYNLQEIVPGSVWMKRDVYLQGPIWAKIPETGAHFHPSPAMGGFGLKHPPPMMLIKNTPVPGNITSFSDVPVSSFITQYSTGQVTVEMEWELKKENSKRWNPEIQYTNNYNDPQFVDFAPDSTGEYRTTRPIGTRYLTRPL

SEQ ID NO: 1214 - protein, 724 aa, synthetic construct
  source 1..724: note = Description of Artificial Sequence: Synthetic polypeptide
MSFVDHPPDWLEEVGEGLREFLGLEAGPPKPKPNQQHQDQARGLVLPGYNYLGPGNGLDRGEPVNRADEVAREHDISYNEQLEAGDNPYLKYNHADAEFQEKLADDTSFGGNLGKAVFQAKKRVLEPFGLVEEGAKTAPTGKRIDDHFPKRKKARTEEDSKPSTPSDAEAGPSGSQQLQIPAQPASSLGADTMSAGGGGPLGDNNQGADGVGNASGDWHCDSTWMGDRVVTKSTRTWVLPSYNNHQYREIKSGSVDGSNANAYFGYSTPWGYFDFNRFHSHWSPRDWQRLINNYWGFRPRSLRVKIFNIQVKEVTVQDSTTTIANNLTSTVQVFTDDDYQLPYVVGNGTEGCLPAFPPQVFTLPQYGYATLNRDNTENPTERSSFFCLEYFPSKMLRTGNNFEFTYNFEEVPFHSSFAPSQNLFKLANPLVDQYLYRFVSTNNTGGVQFNKNLAGRYANTYKNWFPGPMGRTQGWNLGSGVNRASVSAFATTNRMELEGASYQVPPQPNGMTNNLQGSNTYALENTMIFNSQPANPGTTATYLEGNMLITSESETQPVNRVAYNVGGQMATNNQSSTTAPATGTYNLQEIVPGSVWMERDVYLQGPIWAKIPETGAHFHPSPAMGGFGLKHPPPMMLIKNTPVPGNITSFSDVPVSSFITQYSTGQVTVEMEWELKKENSKRWNPEIQYTNNYNDPQFVDFAPDSTGEYRTTRPIGTRYLTRPL

SEQ ID NO: 1215 - protein, 724 aa, synthetic construct
  source 1..724: note = Description of Artificial Sequence: Synthetic polypeptide
MSFVDHPPDWLEEVGEGLREFLGLEAGPPKPKPNQQHQDQARGLVLPGYNYLGPGNGLDRGEPVNRADEVAREHDISYNEQLEAGDNPYLKYNHADAEFQEKLADDTSFGGNLGKAVFQAKKRVLEPFGLVEEGAKTAPTGKRIDDHFPKRKKARTEEDSKPSTSSDAEAGPSGSQQLQIPAQPASSLGADTMSAGGGGPLGDNNQGADGVGNASGDWHCDSTWMGDRVVTKSTRTWVLPSYNNHQYREIKSGSVDGSNANAYFGYSTPWGYFDFNRFHSHWSPRDWQRLINNYWGFRPRSLRVKIFNIQVKEVTVQDSTTTIANNLTSTVQVFTDDDYQLPYVVGNGTEGCLPAFPPQVFTLPQYGYATLNRDNTENPTERSSFFCLEYFPSKMLRTGNNFEFTYNFEEVPFHSSFAPSQNLFKLANPLVDQYLYRFVSTNNTGGVQFNKNLAGRYANTHKNWFPGPMGRTQGWNLGSGVNRASVSAFATTNRMELEGASYQVPPQSNGMTNNLRGSNTYALENTMIFNSQPANPGTTATYLEGNMLITSESETQPVNRVAYNVGGQMATNNQSSTTAPATGTYNLQEIVPGSVWMERDVYLQGPIWAKIPETGAHFHPSPAMGGFGLKHPPPMMLIKNTPVPGNITSFSDVPVSSFITQYSTGQVTVEMEWELKKENSKRWNPEIQYTNNYNDPQFVDFAPDSTGEYRTTRPIGTRYLTRPL

SEQ ID NO: 1216 - protein, 724 aa, synthetic construct
  source 1..724: note = Description of Artificial Sequence: Synthetic polypeptide
MSFVDHPPDWLEEVGEGLREFLGLEAGPPKPKPNQQHQDQARGLVLPGYNYLGPGNGLDRGEPVNRADEVAREHDISYNEQLEAGDNPYLKYNHADAEFQEKLADDTSFGGNLGKAVFQAKKRVLEPFGLVEEGAKTAPTGKRIDDHFPKRKKARTEEDSKPSTSSDAEAGPSGSQQLQIPAQPASSLGADTMSAGGGGPLGDNNQGADGVGNASGDWHCDSTWMGDRVVTKSTRTWVLPSYNNHQYREIKSGSVDGSNANAYFGYSTPWGYFDFNRFHSHWSPRDWQRLINNYWGFRPRSLRVKIFNIQVKEVTVQDSTTTIANNLTSTVQVFTDDDYQLPYVVGNGTEGCLPAFPPQVFTLPQYGYATLNRDNTENPTERSSFFCLEYFPSKMLRTGNNFEFTYNFEEVPFHSSFAPSQNLFKLANPLVDQYLYRFVSTNNTGGVQFNKNLAGRYANTYKNWFPGPMGRTQGWNLGSGVNRASVSAFATTNRMELEGASYQVPPQPNGMTNNLQGSNTYALENTMIFNSQPANPGTTATYLEGNMLITSESETQPVNRVAYSVGGQMATNNQSSTTAPTTGTYNLQEIVPGSVWMERDVYLQGPIWAKIPETGAHFHPSPAMGGFRLKHPPPMMLIKNTPVPGNITSFSDVPVSSFITQYSTGQVTVEMEWELKKENSKRWNPEIQYTNNYNDPQFVDFAPDSTGEYRTTRPIGTRYLTRPL

SEQ ID NO: 1217 - protein, 724 aa, synthetic construct
  source 1..724: note = Description of Artificial Sequence: Synthetic polypeptide
MSFVDHPPDWLEEVGEGLREFLGLEAGPPKPKPNQQHQDQARGLVLPGYNYLGPGNGLDRGEPVNRADEVAREHDISYNEQLEAGDNPYLKYNHADAEFQEKLADDTSFGGNLGKAVFQAKKRVLEPFGLVEEGAKTAPTGKRIDDHFPKRKKARTEEDSKPSTSSDAEAGPSGSQQLQIPAQPASSLGADTMSAGGGGPLGDNNQGADGVGNASGDWHCDSTWMGDRVVTKSTRTWVLPSYNNHQYREIKSGSVDGSNANAYFGYSTPWGYFDFNRFHSHWSPRDWQRLINNYWGFRPRSLRVKIFNIQVKEVTVQDSTTTIANNLTSTVQVFTDDDYQLPYVVGNGTEGCLPAFPPQVFTLPQYGYATLNRDNTENPTERSSFFCLEYFPSKMLRTGNNFEFTYNFEEVPFHSSFAPSQNLFKLANPLVDQYLYRFVSTNNTGGVQFNKNLAGRYANTYKNWFPGPMGRTQGWNLGSGVNRASVSAFAATNRMELEGASYQVPPQPNGMTNNLQGSNTYALENTMIFNSQPANPGTTATYLEGNMLITSESETQPVNRVAYNVGGQMATNNQSSTTAPATGTYNLQEIVPGGVWMERDVYLQGPIWAKIPETGAHFHPSPAMGGFGLKHPPPMMLIKNTPVPGNTTSFSDVPVSSFITQYSTGQVTVEMEWELKKENSKRWNPEIQYTNNYNDPQFVDFAPDSTGEYRTTRPIGTRYLTRPL

SEQ ID NO: 1218 - protein, 724 aa, synthetic construct
  source 1..724: note = Description of Artificial Sequence: Synthetic polypeptide
MSFVDHPPDWLEEVGEGLREFLGLEAGPPKPKPNQQHQDQARGLVLPGYNYLGPGNGLDRGEPVNRADEVAREHDISYNEQLEAGDNPYLKYNHADAEFQEKLADDTSFGGNLGKVVFQAKKRVLEPFGLVEEGAKTAPTGKRIDDHFPKRKKARTEEDSKPSTSSDAEAGPSGSQQLQIPAQPASSLGADTMSAGGGGPLGGNNQGADGVGNASGDWHCDSTWMGDRVVTKSTRTWVLPSYNNHQYREIKSGSVDGSNANAYFGYSTPWGYFDFNRFHSHWGPRDWQRLINNYWGFRPRSLRVKIFNIQVKEVTVQDSTTTIANNLTSTVQVFTDDDYQLPYVVGNGTEGCLPAFPPQVFTLPQYGYATLNRDNTENPTERSSFFCLEYFPSKMLRTGNNFEFTYNFEEVPFHSSFAPSQNLFKLANPLVDQYLYRFVSTNNTGGVQFNKNLAGRYANTYKNWFPGPMGRTQGWNLGSGVNRASVSALATTNRMELEGASYQVPPQPNGMTNNLQGSNTYALENTMIFNSQPANPGTTATYLEGNMLITSESETQPVNRVAYNVGGQMATNNQSSTTAPATGTYNLQEIVPGSVWMERDVYLQGPIWAKIPETGAHFHPSPAMGGFGLKHPPPMMLIKNTPVPGNITSFSDVPVSSFITQYSTGQVTVEMEWELKKENSKRWNPEIQYTNNYNDPQFVDFAPDSTGEYRTTRPIGTRYLTRPL

SEQ ID NO: 1219 - protein, 723 aa, synthetic construct
  source 1..723: note = Description of Artificial Sequence: Synthetic polypeptide
MSFVDHPPDWLEEVGEGLREFLGLEAGPPKPKPNQQHQDQARGLVLPGYNYLGPGNGLDRGEPVNRADEVAREHDISYNEQLEAGDNPYLKYNHADAEFQEKLADDTSFGGNLGKAVFQAKKRVLEPFGLVEEGAKTAPTGKRIDDHFPKRKKARTEEDSKPSTSSDAEAGPSGSQQLQIPAQPASSLGADTMSAGGGGPLGDNNQGADGVGNASGDWHCDSTWMGDRVVTKSTRTWVLPSYNNHQYREIKSGSVDGSNANAYFGYSTPWGYFDFNRFHSHWSPRDWQRLINNYWGFRPRSLRVKIFNIQVKEVTVQDSTTTIANNLTSTVQVFTDDDYQLPYVVGNGTEGCLPAFPPQVFTLPQYGYATLNRDNTENPTERSSFFCLEYFPSKMLRTGNNFEFTYNFEEVPFHSSFAPSQNLFKLANPLVDQYLYRFVSTNNTGGVQFNKNLAGRYANTYKNWFPGPMGRTQGWNLGSGVNRASVSAFATTNRMELEGASYQVPPQPNGMTNNLQGSNTYALENTMIFNSQPANPGTTATYLEGNMLITSESETQPVNRVAYNVGGQMATNNQSSTTAPATGTYNLQEIVPGSVWMERDVYLQGPIAKIPETGAHFHPSPAMGGFGLKHPPPMMLIKNTPVPGNITSFSDVPVSSFITQYSTGQVTVEMEWELKKENSKRWNPEIQYTNNYNDPQFVDFAPDSTGECRTTRPIGTRYLTRPL

SEQ ID NO: 1220 - protein, 724 aa, synthetic construct
  source 1..724: note = Description of Artificial Sequence: Synthetic polypeptide
MSFVDHPPDWLEEVGEGLREFLGLEAGPPKPKPNQQHQDQARGLVLPGYNYLGPGNGLDRGEPVNRADEVAREHDISYNEQLEAGDNPYLKYNHADAEFQEKLADDTSFGGNLGKAVFQAKKRVLEPFGLVEEGAKTAPTGKRIDDHFPKRKKARTEEDSKPSTSSDAEAGPSGSQQLQIPAQPASSLGADTMSAGGGGPLGDNNQGADGVGNASGDWHCDSTWMGDRVVTKSTRTWVLPSYNNHQYREIKSGSVDGSNANAYFGYSTPWGYFDFNRFHSHWSPRDWQRLINNYWGFRPRSLRVKILNIQVKEVTVQDSTTTIANNLTSTVQVFTDDDYQLPYVVGNGTEGCLPAFPPQVFTLPQYGYATLNRDNTENPTERSSFFCLEYFPSKMLRTGNNFEFTYNFEEVPFHSSFAPSQNLFKLANPLVGQYLYRFVSTNNTGGVQFNENLAGRYANTYKNWFPGPMGRTQGWNLGSGVNRASVSAFATTNRMELEGASYQVPPQPNGMTNNLQGSNTYALENTMIFNSQPANPGTTATYLEGNMLITSESETQPVNRVAYNVGGQMATNNQSSTTAPATGTYNLQEIVPGSVWMERDVYLQGPIWAKIPETGAHFHPSPAMGGFGLKHPPPMMLIKNTPVPGNITSFSDVPVSSFITQYSTGQATVEMEWELKKENSKRWNPEIQYTNNYNDPQFVDFAPDSTGEYRTTRPIGTRYLTRPL

SEQ ID NO: 1221 - protein, 724 aa, synthetic construct
  source 1..724: note = Description of Artificial Sequence: Synthetic polypeptide
MSFVDHPPDWLEEVGEGLREFLGLEAGPPKPKPNQQHQDQARGLVLPGYNYLGPGNGLDRGEPVNRADEVAREHDISYNEQLEAGDNPYLKYNHADAEFQEKLADDTSFGGNLGKAVFQAKKRVLEPFGLVEEGAKTAPTGKRIDDHFPKRKKARTEEDSKPSTSSDAEAGPSGSQQLQIPAQPASSLGADTMSAGGGGPLGDNNQGADGVGNASGDWHCDSTWMGDRVVTKSTRTWVLPSYNNHQYREIKSGSVDGSNANAYFGYSTPWGYFDFNRFHSHWSPRDWQRLINNYWGFRPRSLRVKIFNIQVKEVTVQDSTTIIANNLTSTVQVFTDDDYQLPYVVGNGTEGCLPAFPPQVFTLPQYGYATLNRDNTENPTERSSFFCLEYFPSKMLRTGNNFEFTYNFEEVPFHSSFAPSQNLFKLANPLVDQYLYRFVSTNNTGGVQFNKNLAGRYANTYKNWFPGPMGRTQGWNLGSGVNRASVSAFATTNRMELEGASYQVPPQPNGMTNNLQGSNTYALENTMIFNSQPANPGTTATYLEGNMLITSESETQPVNRVAYNVGGQMATNNQSSTTAPATGTYNLQEIVPGSVWMERDVYLQGPIWAKIPETGAHFHPSPAMGGFGLKHPPPMMLIKNTPVPGNITSFSDVPVSSFITQYSTGQVTVEMEWELKKENSKRWNPEIQYTNNYNDPQFVDFAPDSTGEYRTTRPIGTRYLTRPL

SEQ ID NO: 1222 - protein, 724 aa, synthetic construct
  source 1..724: note = Description of Artificial Sequence: Synthetic polypeptide
MSFVDHPPDWLEEVGEGLREFLGLEAGPPKPKPNQQHQDQARGLVLPGYNYLGPGNGLDRGEPVNRADEVAREHDISYNEQLEAGDNPYLKYNHADAEFQEKLADDTSFGGNLGKAVFQAKKRVLEPFGLVEEGAKTAPTGKRIDDHFPKRKKARTEEDSKPSTSSDAEAGPSGSQQLQIPAQPASSLGADTMSAGGGGPLGDNNQGADGVGNASGDWHCDSTWMGDRVVTKSTRTWVLPSYNNHQYREIKSGSVDGSNANAYFGYSTPWGYFDFNRFHSHWSPRDWQRLINNYWGFRPRSLRVKIFNIQVKEVTVQDSTTTIANNLTSTVQVFTDDDYQLPYVVGNGTEGCLPAFPPQVFTLPQYGYATLNRDNTENPTERSSFFCLEYFPSKMLRTGNNFEFTYNFEEVPFHSSFAPSQNLFKLANPLVDQYLYRFVSTNNTGGVQFNKNLAGRYANTYKNWFPGPMGRTQGWNLGSGVNRASVSAFATTNRMELEGASYQVPPQPNGMTNNLQGSNTYALENTMIFNSQPANPGTTATYLEGNMLITSESETQPVNRVAYNVGGQMATNNQSSTTAPATGTYNLQEIVPGSVWMERDVYLQGPIWAKIPETGAHFHPSPAMGGFGLKHPPPMMLIKNTPVPGNITSLSDVPVSSFITQYSTGQVTVEMEWELKKENSKRWNPEIQYTNNYNDPQFVDFAPDSTGEYRTTRPIGTRYLTRPL

SEQ ID NO: 1223 - protein, 724 aa, synthetic construct
  source 1..724: note = Description of Artificial Sequence: Synthetic polypeptide
MSFVDHPPDWLEEVGEGLREFLGLEAGPPKPKPNQQHQDQARGLVLPGYNYLGPGNGLDRGEPANRADEVAREHDISYNEQLEAGDNPYLKYNHAGAEFQEKLADDTSFGGNLGKAVFQAKKRVLEPFGLVEEGAKTAPTGKRIDDHFPKRKKARTEEDSKPSTSSDAEAGPSGSQQLQIPAQPASSLGADTMSAGGGGPLGDNNQGADGVGNASGDWHCDSTWMGDRVVTKSTRTWVLPGYNNHQYREIKSGSVDGSNANAYFGYSTPWGYFDFNRFHSHWSPRDWQRLINNYWGFRPRSLRVKIFNIQVKEVTVQDSTTTIANNLTSTVQVFTDDDYQLPYVVGNGTEGCLPAFPPQVFTLPQYGYATLNRDNTENPTERSSFFCLEYFPSKMLRTGNNFEFTYNFEEVPFHSSFAPSQNLFKLANPLVDQYLYRFVSTNNTGGVQFNKNLAGRYANTYKNWFPGPMGRTQGWNLGSGVNRASVSAFATTNRMELEGASYQVPPQPNGMTNNLQGSNTYALENTMIFNSQPANPGTTATYLEGNMLITSESETQPVNRVAYNVGGQMATNNQSSTTAPATGTYNLQEIVPGSVWMERDVYLQGPIWAKIPETGAHFHPSPAMGGFGLKHPPPMMLIKNTPVPGNITSFSDVPVSSFITQYSTGQVTVEMEWELKKENSKRWNPEIQYTNNYNDPQFVDFAPDSTGEYRTTRPIGTRYLTRPL

SEQ ID NO: 1224 - protein, 724 aa, synthetic construct
  source 1..724: note = Description of Artificial Sequence: Synthetic polypeptide
MSFVDHPPDWLEEVGEGLREFLGLEAGPPKPKPNQQHQDQARGLVLPGYNYLGPGNGLDRGEPVNRADEVAREHDISYNEQLEAGDNPYLKYNHADAEFQEKLADDTSFGGNLGKAVFQAKKRVLEPFGLVEEGAKTAPTGKRIDDHFPKRKKARTEEDSKPPTSSDAEAGPSGSQQLQIPAQPASSLGADTMSAGGGGPLGDNNQGADGVGNASGDWHCDSTWMGDRVVTKSTRTWVLPSYNNHQYREIKSGSVDGSNANAYFGYSTPWGYFDFNRFHSHWSPRDWQRLINNYWGFRPRSLRVKIFNIQVKEVTVQDSATTIANNLTSTVQVFTDDDYQLPYVVGNGTEGCLPAFPPQVFTLPQYGYATLNRDNTENPTERSSFFCLEYFPSKMLRTGNNFEFTYNFEEVPFHSSFAPSQNLFKLANPLVDQYLYRFVSTNNTGGVQFNKNLAGRYANTYKNWFPGPMGRTQGWNLGSGVNRASVSAFATTNRMELEGASYQVPPQPNGMTNNLQGSNTYALENTMIFNSQPANPGTTATYLEGNMLITSESETQPVNRVAYNVGGQMATNNQSSTTAPATGTYNLQEIVPGSVWMERDVYLQGPIWAKIPETGAHFHPSPAMGGFGLKHPPPMMLIKNTPVPGNITSFSDVPVSSFITQYSTGQVTVEMEWELKKENSKRWNPEIQYTNNYNDPQFVDFAPDSTGEYRTTRPIGTRYLTRPL

SEQ ID NO: 1225 - protein, 724 aa, synthetic construct
  source 1..724: note = Description of Artificial Sequence: Synthetic polypeptide
MSFVDHPPDWLEEVGEGLREFLGLEAGPPKPKPNQQHQDQARGLVLPGYNYLGPGNGLDRGEPVNRADEVAREHDISYNEQLEAGDNPYLKYNHADAEFQEKLADDTSFGGNLGKAVFQAKKRVLEPFGLVEEGAKTAPTGKRIDDHFPKRKKARTEEDSKPSTSSDAEAGPSGSQQPQIPAQPASSLGADTMSAGGGGPLGDNNQGADGVGNASGDWHCDSTWMGDRVVTKSTRTWVLPSYNNHQYREIKSGSVDGSNANAYFGYSTPWGYFDFNRFHSHWSPRDWQRLINNYWGFRPRSLRVKIFNIQVKEVTVQDSTTTIANNLTSTVQVFTDDDYQLPYVVGNGTEGCLPAFPPQVFTLPQYGYATLNRDNTENPTERSSFFCLEYFPSKMLRTGNNFEFTYNFEEVPFHSSFAPSQNLFKLANPLVDQYLYRFVSTNNTGGVQFNKNLAGRYANTYKNWFPGPMGRTQGWNLGSGVNRASVSAFATTNRMELEGASYQVPPQPNGMTNNLQGSNTYALENTMIFNSQPANPGTTATYLEGNMLITSESETQPVNRVAYNVGGQMATNNQSSTTAPATGTYNLQEIVPGSVWMERDVYLQGPIWAKIPETGAHFHPSPAMGGFGLKHPPPMMLIKNTPAPGNITSFSDVPVSSFITQYSTGQVTVEMEWELKKENSKRWNPEIQYTNNYNDPQFVDFAPDSTGEYRTTRPIGTRYLTRPL

SEQ ID NO: 1226 - protein, 724 aa, synthetic construct
  source 1..724: note = Description of Artificial Sequence: Synthetic polypeptide
MSFVDHPPDWLEEVGEGLREFLGLEAGPPKPKPNQQHQDQARGLVLPGYNYLGPGNGLDRGEPVNRADEVAREHDISYNEQLEAGDNPYLKYNHADAEFQEKLADDTSFGGNLGKAVFQAKKRVLEPFGLVEEGAKTAPTGKRIDDHFPKRKKARTEEDSKPPTSSDAEAGPSGSQQLQIPAQPASSLGADTMSAGGGGPLGDNNQGADGVGNASGDWHCDSTWMGDRVVTKSTRTWVLPSYNNHQYREIKSGSVDGSNANAYFGYSTPWGYFDFNRFHSHWSPRDWQRLINNYWGFRPRSLRVKIFNIQVKEVTVQDSTTTIANNLTSTVQVFTDDDYQLPYVVGNGTEGCLPAFPPQVFTLPQYGYATLNRDNTENPTERSSFFCLEYFPSKMLRTGNNFEFTYNFEEVPFHSSFAPSQNLFKLANPLVDQYLYRFVSTNNTGGVQFNKNLAGRYANTYKNWFPGPMGRTQGWNLGSGVNRASVSAFATTNRMELEGASYQVPPQPNGMTNNLQGSNTYALENTMIFNSQPANPGTTATYLEGNMLITSESETQPVNRVAYNVGGQMATNNQSSTTAPATGTYNLQEIVPGSVWMERDVYLQGPIWAKIPETGAHFHPSPAMGGFGLKHPPPMMLIKNTPVPGNITSFSDVPVSSFITQYSTGQVTVEMEWELKKENSKRWNPEIQYTNNYNDPQFVDFAPDSTGEYRTTRPIGTRYLTRPL

SEQ ID NO: 1227 - protein, 724 aa, synthetic construct
  source 1..724: note = Description of Artificial Sequence: Synthetic polypeptide
MSFVDHPPDWLEEVGEGLREFLGLEAGPPKPKPNQQHQDQARGLVLPGYNYLGPGNGLDRGEPVNRADEVAREHDISYNEQLEAGDNPYLKYNHADAEFQEKLADDTSFGGNLGKAVFQAKKRVLEPFGLVEEGAKTAPTGKRIDDHFPKRKKARTEEDSKPPTSSDAEAGPSGSQQLQIPAQPASSLGADTMSAGGGGPLGDNNQGADGVGNASGDWHCDSTWMGDRVVTKSTRTWVPPSYNNHQYREIKSGSVDGSNANAYFGYSTPWGYFDFNRFHSHWSPRDWQRLINNYWGFRPRSLRVKIFNIQVKEVTVQDSTTTIANNLTSTVQVFTDDDYQLPYVVGNGTEGCLPAFPPQVFTLPQYGYATLNRDNTENPTERSSFFCLEYFPSKMLRTGNNFEFTYNFEEVPFHSSFAPSQNLFKLANPLVDQYLYRFVSTNNTGGVQFNKNLAGRYANTYKNWFPGPMGRTQGWNLGSGVNRASVSAFATTNRMELEGASYQVPPQPNGMTNNLQGSNTYALENTMIFNSQPANPGTTATYLEGNMLITSESETQPVNRVAYNVGGQMATNNQSSTTAPATGTYNLQEIVPGSVWMERDVYLQGPIWAKIPETGAHFHPSPAMGGFGLKHPPPMMLIKNTPVPGNITSFSDVPVSSFITQYSTGQVAVEMEWELKKENSKRWNPEIQYTNNYNDPQFVDFAPDSTGEYRTTRPIGTRYLTRPL

SEQ ID NO: 1228 - protein, 724 aa, synthetic construct
  source 1..724: note = Description of Artificial Sequence: Synthetic polypeptide
MSFVDHPPDWLEEVGEGLREFLGLEAGPPKPKPNQQHQDQARGLVLPGYNYLGPGNGLDRGEPVNRADEVAREHDISYNEQLEAGDNPYLKYNHADAEFQEKLADDTSFGGNLGKAVFQAKKRVLEPFGLVEEGAKTAPTGKRIDDHFPKRKKARTEEDSKPSTSSDAEAGPSGSQQLQIPAQPASSLGADTMSAGGGGPLGDNNQGADGVGNASGDWHCDSTWMGDRVVTKSTRTWVLPSYNNHQYREIKSGSVDGSNANAYFGYSTPWGYFDFNRFHSHWSPRDWQRLINNYWGFRPRSLRVKIFNIQVKEVTVQDSTTTIANNLTSTVQVFTDDDYQLPYVVGNGTEGCLPAFPPQVFTLPQYGYATLNRDNTENPTERSSFFCLEYFPSKMLRTGNNFEFTYNFEEVPFHSSFAPSQNLFKLANPLVDQYLYRFVSTNNTGGVQFNKNLAGRYANTYKNWFPGPMGRTQGWNLGSGVNRASVSAFATTNRMELEGASYQVPPQPNGMTNNLQGSNTYALENTMIFNSQPANPGTTATYLEGNMLITSESETQPVNRVAYNVGGQMATNNQSSTTAPATGTYNLQEIVPGSVWMERDVYLQGPIWAKIPETGAHFHPSPAMGGFGLKHPPPMMLIKNTPAPGNITSFSDVPVSSFITQYSTGQVTVEMEWELKKENSKRWNPEIQYTNNYNDPQFVDFAPDSTGEYRTTRPIGTRYLTRPL

SEQ ID NO: 1229 - protein, 724 aa, synthetic construct
  source 1..724: note = Description of Artificial Sequence: Synthetic polypeptide
MSFVDHPPDWLEEVGEGLREFLGLEAGPPKPKPNQQHQDQARGLVLPGYNYLGPGNGLDRGEPVNRADEVAREHDISYNEQLEAGDNPYLKYNHADAEFQEKLADDTSFGGNLGKAVFQAKKRVLEPFGLAEEGAKTAPTGKRIDDHFPKRKKARTEEDSKPSTSSDAEAGPSGSQQLQIPAQPASSLGADTMSAGGGGPLGDNNQGADGVGNASGDWHCDSTWMGDRVVTKSTRTWVLPSYNNHQYREIKSGSVDGSNANAYFGYSTPWGYFDFNRFHSHWSPRDWQRLINNYWGFRPRSLRAKIFNIQVKEVTVQDSTTTIANNLTSTVQVFTDDDYQLPYVVGNGTEGCLPAFPPQVFTLPQYGYATLNRDNTENPTERSSFFCLEYFPSKMLRTGNNLEFTYNFEEVPFHSSFAPSQNLFKLANPLVDQYLYRFVSTNNTGGVQFNKNLAGRYANTYKNWFPGPMGRTQGWNLGSGVNRASVSAFATTNRMELEGASYQVPPQPNGMTNNLQGSNTYALENTMIFNSQPANPGTTATYLEGNMLITSESETQPVNRVVHNVGGQMATNNQSSTTAPATGTYNLQEIVPGSVWMERDVYLQGPIWAKIPETGAHFHPSPAMGGFGLKHPPPMMLIKNTPVPGNITSFSDVPVSSFITQYSTGQVTVEMEWELKKENSKRWNPEIQYTNNYNDPQFVDFAPDSTGEYRTTRPIGTRYLTRPL

SEQ ID NO: 1230 - protein, 724 aa, synthetic construct
  source 1..724: note = Description of Artificial Sequence: Synthetic polypeptide
MSFVDHPPDWLEEVGEGLREFLGLEAGPPKPKPNQQHQDQARGLVLPGYNYLGPGNGLDRGEPVNRADEVAREHDISYNEQLEAGDNPYLKYNHADAEFQEKLADDTSFGGNLGKAVFQAKKRVLEPFGLVEEGAKTAPTGKRIDDHFPKRKKARTEEDSKPSTSSDAEAGPSGSQQLQIPAQPASSLGADTMSAGGGGPLGDNNQGADGVGNASGDWHCDSTWMGDRVVTKSTRTWVLPSYNNHQYREIKSGSVDGGNANAYFGYSTPWGYFDFNRFHSHWSPRDWQRLINNYWGFRPRSLRVKIFNIQVKEVTVQDSTTTIANNLTSTVQVFTDDDYQLPYVVGNGTEGCLPAFPPQVFTLPQYGYATLNRDNTENPTERSSFFCLEYFPSKMLRTGNNFEFTYNFEEVPFHSSFAPSQNLFKLANPLVDQYLYRFVSTNNTGGVQFNKNLAGRYANTYKNWFPGPMGRTQGWNLGSGVNRASVSAFATTNRMELEGASYQVPPQPNGMTNNLQGSNTYALENTMIFNSQPANPGTTATYLEGNMLITSESETQPVNRVAYNVGGQMATNNQSSTTAPATGTYNLQEIVPGSVWMERDVYLQGPIWAKIPETGAHFHPSPAMGGFGLKHPPPMMLIKNTPAPGNITSFSDVPVSSFITQYSTGQVTVEMEWELKKGNSKRWNPEIQYTNNYNDPQFVDFAPDSTGEYRTTRPIGTRYLTRPL

SEQ ID NO: 1231 - protein, 724 aa, synthetic construct
  source 1..724: note = Description of Artificial Sequence: Synthetic polypeptide
MSFVDHPPDWLEEVGEGLREFLGLEAGPPKPKPNQQHQDQARGLVLPGYNYLGPGNGLDRGEPVNRADEVAREHDISYNEQLEAGDNPYLKYNHADAEFQEKLADDTSFGGNLGKAVFQAKKRVLEPFGLVEEGAKTAPTGKRIDDHFPKRKKARTEEDSKPSTSSDAEAGPSGSQQLQIPAQPASSLGADTMSAGGGGPLGDNNQGADGVGNASGDWHCDSTWMGDRVVTKSTRTWVLPSYNNHQYREIKSGSVDGSNANAYFGYSTPWGYFDFNRFHSHWSPRDWQRLINNYWGFRPRSLRVKIFNIQVKEVTVQDSTTTIANNLTSTVQVFTDDDYQLPYVVGNGTEGCLPAFPPQVFTLPQYGYATLNRDNTENPTERSSFFCLEYFPSKMLRTGNNFEFTYNFEEVPFHSSFAPSQNLFKLANPLVDQYLYRFVSTNNTGGVQFNKNLAGRYANTYKNWFPGPMGRTQGWNLGSGVNRASVSAFATTNRMELEGASYQVPPQPNGMTNNLQGSNTYALENTMIFNSQPANPGTTATYLEGNMLITSESETQPVNRVAYNVGGQMATNNQSSTTAPATGTYNLQEIVPGSVWMERDVYLQGPIWAKIPETGVHFHPSPAMGGFGLKHPPPMMLIKNTPVPGNITSFSDVPVSSFITQYSTGQVTVEMEWELKKENSKRWNPEIQYTNNYNDPQFVDFAPDSTGEYRTTRPIGTRYLTRPL

SEQ ID NO: 1232 - protein, 724 aa, synthetic construct
  source 1..724: note = Description of Artificial Sequence: Synthetic polypeptide
  VARIANT 551: note = MOD_RES - Any amino acid
MSFVDHPPDWLEEVGEGLREFLGLEAGPPKPKPNQQHQDQARGLVLPGYNYLGPGNGLDRGEPVNRADEVAREHDISYNEQLEAGDNPYLKYNHADAEFQEKLADDTSFGGNLGKAVFQAKKRVLEPFGLVEEGAKTAPTGKRIDDHFPKRKKARTEEDSKPSTSSDAEAGPSGSQQLQIPAQPASSLGADTMSAGGGGPLGDNNQGADGVGNASGDWHCDSTWMGDRVVTKSTRTWVLPSYNNHQYREIKSGSVDGSNANAYFGYSTPWGYFDFNRFHSHWSPRDWQRLINNYWGFRPRSLRVKIFNIQVKEVTVQDSTTTIANNLTSTVQVFTDDDYQLPYVVGNGTEGCLPAFPPQVFTLPQYGYATLNRDNTENPTERSSFFCLEYFPSKMLRTGNNFEFTYNFEEVPFHSSFAPSQNLFKLANPLVDQYLYRFVSTNNTGGVQFNKNLAGRYANTYKNWFPGPMGRTQGWNLGSGVNRASVSAFATTNRMELEGASYQVPPQPNGMTNNLQGSNTYALENTMIFNSQPANPGTTATYLEGSMLITXESETQPVNRVAYNVGGQMATNNQSSTTAPATGTYNLQEIVPGSVWMERDVYLQGPIWAKIPETGAHFHPSPAMGGFGLKHPPPMMLIKNTPVPGNITSFSDVPVSSFITQYSTGQVTVEMEWELKKENSKRWNPEIQYTNNYNDPQFVDFAPDSTGEYRTTRPIGTRYLTRPL

SEQ ID NO: 1233 - protein, 736 aa, synthetic construct; identical to SEQ ID NO: 407
  source 1..736: note = Description of Artificial Sequence: Synthetic polypeptide

SEQ ID NO: 1234 - protein, 734 aa, synthetic construct; identical to SEQ ID NO: 425
  source 1..734: note = Description of Artificial Sequence: Synthetic polypeptide

SEQ ID NO: 1235 - protein, 723 aa, synthetic construct
  source 1..723: note = Description of Artificial Sequence: Synthetic polypeptide
MSFVDHPPDWLEEVGEGLREFLGLEAGPPKPKPNQQHQDQARGLVLPGYNYLGPGNGLDRGEPVNRADEVAREHDISYNEQLEAGDNPYLKYNHADAEFQEKLADDTSFGGNLGKAVFQAKKRVLEPFGLVEEGAKTAPTGKRIDDHFPKRKKARTEEDSKPSTSSDAEAGPSGSQQLQIPAQPASSLGADTMSAGGGPLGDNNQGADGVGNASGDWHCDSTWMGDRVVTKSTRTWVLPSYNNHQYREIKSGSVDGSNANAYFGYSTPWGYFDFNRFHSHWSPRDWQRLINNYWGFRPRSLRVKIFNIQVKEVTVQDSTTTIANNLTSTVQVFTDDDYQLPYVVGNGTEGCLPAFPPQVFTLPQYGYATLNRDNTENPTERSSFFCLEYFPSKMLRTGNNFEFTYNFEEVPFHSSFAPSQNLFKLANPLVDQYLYRFVSTNNTGGVQFNKNLAGRYANTYKNWFPGPMGRTQGWNLGSGVNRASVSAFATTNRMELEGASYQVPPQPNGMTNNLQGSNTYALENTMIFNSQPANPGTTATYLEGNMLITSESETQPVNRVAYNVGGQMATNNQSSTTAPATGTYNLQEIVPGSVWMERDVYLQGPIWAKIPETGAHFHPSPAMGGFGLKHPPPMMLIKNTPVPGNITSFSDVPVSSFITQYSTGQVTVEMEWELKKENSKRWNPEIQYTNNYNDPQFVDFAPDSTGEYRTTRPIGTRYLTRPL

SEQ ID NO: 1236 - protein, 743 aa, synthetic construct
  source 1..743: note = Description of Artificial Sequence: Synthetic polypeptide
MAADGYLPDWLEDNLSEGIREWWALKPGAPQPKANQQHQDNARGLVLPGYKYLGPGNGLDKGEPVNAADAAALEHDKAYDQQLKAGDNPYLKYNHADAEFQERLKEDTSFGGNLGRAVFQAKKRLLEPLGLVEEAAKTAPGKKRPVEQSPQEPDSSAGIGKSGAQPAKKRLNFGQTGDTESVPDPQPIGEPPAAPSGVGSLTMASGGGAPVADNNEGADGVGSSSGNWHCDSQWLGDRVITTSTRTWALPTYNNHLYKQISNSTSGGSSNDNAYFGYSTPWGYFDFNRFHCHFSPRDWQRLINNNWGFRPKRLNFKLFNIQVKEVTDNNGVKTIANNLTSTVQVFTDSDYQLPYVLGSAHEGCLPPFPADVFMIPQYGYLTLNDGSQAVGRSSFYCLEYFPSQMLRTGNNFQFSYEFENVPFHSSYAHSQSLDRLMNPLIDQYLYYLSRTINGSGQNQQTLKFSVAGPSNMAVQGRNYIPGPSYRQQRVSTTVTQNNNSEFAWPGASSWALNGRNSLMNPGPAMASHKEGEDRFFPLSGSLIFGKQGTGRDNVDADKVMITNEEEIKTTNPVATESYGQVATNHQSAQTLAVPFKAQAQTGWVQNQGILPGMVWQDRDVYLQGPIWAKIPHTDGNFHPSPLMGGFGMKHPPPQILIKNTPVPADPPTAFNKDKLNSFITQYSTGQVSVEIEWELQKENSKRWNPEIQYTSNYYKSNNVEFAVNTEGVYSEPRPIGTRYLTRNL

SEQ ID NO: 1237 - DNA, 2232 bp, synthetic construct
  source 1..2232: mol_type = other DNA; note = Description of Artificial Sequence: Synthetic polynucleotide
atggctgccgatggttatcttccagattggctcgaggacaaccttagtgaaggaattcgcgagtggtgggctttgaaacctggagcccctcaacccaaggcaaatcaacaacatcaagacaacgctcgaggtcttgtgcttccgggttacaaataccttggacccggcaacggactcgacaagggggagccggtcaacgcagcagacgcggcggccctcgagcacgacaaggcctacgaccagcagctcaaggccggagacaacccgtacctcaagtacaaccacgccgacgccgagttccaggagcggctcaaagaagatacgtcttttgggggcaacctcgggcgagcagtcttccaggccaaaaagaggcttcttgaacctcttggtctggttgaggaagcggctaagacggctcctggaaagaagaggcctgtagagcagtctcctcaggaaccggactcctccgcgggtattggcaaatcgggtgcacagcccgctaaaaagagactcaatttcggtcagactggcgacacagagtcagtcccagaccctcaaccaatcggagaacctcccgcagccccctcaggtgtgggatctcttacaatggcttcaggtggtggcgcaccagtggcagacaataacgaaggtgccgatggagtgggtagttcctcgggaaattggcattgcgattcccaatggctgggggacagagtcatcaccaccagcacccgaacctgggccctgcccacctacaacaatcacctctacaagcaaatctccaacagcacatctggaggatcttcaaatgacaacgcctacttcggctacagcaccccctgggggtattttgacttcaacagattccactgccacttctcaccacgtgactggcagcgactcatcaacaacaactggggattccggcctaagcgactcaacttcaagctcttcaacattcaggtcaaagaggttacggacaacaatggagtcaagaccatcgccaataaccttaccagcacggtccaggtcttcacggactcagactatcagctcccgtacgtgctcgggtcggctcacgagggctgcctcccgccgttcccagcggacgttttcatgattcctcagtacgggtatctgacgcttaatgatggaagccaggccgtgggtcgttcgtccttttactgcctggaatatttcccgtcgcaaatgctaagaacgggtaacaacttccagttcagctacgagtttgagaacgtacctttccatagcagctacgctcacagccaaagcctggaccgactaatgaatccactcatcgaccaatacttgtactatctctctagaactattaacggttctggacagaatcaacaaacgctaaaattcagtgtggccggacccagcaacatggctgtccagggaagaaactacatacctggacccagctaccgacaacaacgtgtctcaaccactgtgactcaaaacaacaacagcgaatttgcttggcctggagcttcttcttgggctctcaatggacgtaatagcttgatgaatcctggacctgctatggccagccacaaagaaggagaggaccgtttctttcctttgtctggatctttaatttttggcaaacaaggtaccggcagagacaacgtggatgcggacaaagtcatgataaccaacgaagaagaaattaaaactactaacccggtagcaacggagtcctatggacaagtggccacaaaccaccagagtgcccaaactttggcggtgccttttaaggcacaggcgcagaccggttgggttcaaaaccaaggaatacttccgggtatggtttggcaggacagagatgtgtacctgcaaggacccatttgggccaaaattcctcacacggacggcaactttcacccttctccgctgatgggagggtttggaatgaagcacccgcctcctcagatcctcatcaaaaacacacctgtacctgcggatcctccaacggccttcaacaaggacaagctgaactctttcatcacccagtattctactggccaagtcagcgtggagatcgagtgggagctgcagaaggaaaacagcaagcgctggaacccggagatccagtacacttccaactattacaagtctaataatgttgaatttgctgttaatactgaaggtgtatatagtgaaccccgccccattggcaccagatacctgactcgtaatctgtaa

SEQ ID NO: 1238 - protein, 736 aa, synthetic construct
  source 1..736: note = Description of Artificial Sequence: Synthetic polypeptide
MAADGYLPDWLEDNLSEGIREWWALKPGAPQPKANQQHQDNARGLVLPGYKYLGPGNGLDKGEPVNAADAAALEHDKAYDQQLKAGDNPYLKYNHADAEFQERLKEDTSFGGNLGRAVFQAKKRLLEPLGLVEEAAKTAPGKKRPVEQSPQEPDSSAGIGKSGAQPAKKRLNFGQTGDTESVPDPQPIGEPPAAPSGVGSLTMASGGGAPVADNNEGADGVGSSSGNWHCDSQWLGDRVITTSTRTWALPTYNNHLYKQISNSTSGGSSNDNAYFGYSTPWGYFDFNRFHCHFSPRDWQRLINNNWGFRPKRLNFKLFNIQVKEVTDNNGVKTIANNLTSTVQVFTDSDYQLPYVLGSAHEGCLPPFPADVFMIPQYGYLTLNDGSQAVGRSSFYCLEYFPSQMLRTGNNFQFSYEFENVPFHSSYAHSQSLDRLMNPLIDQYLYYLSRTIQSSQTPRQTLKFSVAGPSNMAVQGRNYIPGPSYRQQRVSTTVTQNNNSEFAWPGASSWALNGRNSLMNPGPAMASHKEGEDRFFPLSGSLIFGKQGTGRDNVDADKVMITNEEEIKTTNPVATESYGQVATNHQSAQAQAQTGWVQNQGILPGMVWQDRDVYLQGPIWAKIPHTDGNFHPSPLMGGFGMKHPPPQILIKNTPVPADPPTAFNKDKLNSFITQYSTGQVSVEIEWELQKENSKRWNPEIQYTSNYYKSNNVEFAVNTEGVYSEPRPIGTRYLTRNL

SEQ ID NO: 1239 - protein, 743 aa, synthetic construct
  source 1..743: note = Description of Artificial Sequence: Synthetic polypeptide
MAADGYLPDWLEDNLSEGIREWWALKPGAPQPKANQQHQDNARGLVLPGYKYLGPGNGLDKGEPVNAADAAALEHDKAYDQQLKAGDNPYLKYNHADAEFQERLKEDTSFGGNLGRAVFQAKKRLLEPLGLVEEAAKTAPGKKRPVEQSPQEPDSSAGIGKSGAQPAKKRLNFGQTGDTESVPDPQPIGEPPAAPSGVGSLTMASGGGAPVADNNEGADGVGSSSGNWHCDSQWLGDRVITTSTRTWALPTYNNHLYKQISNSTSGGSSNDNAYFGYSTPWGYFDFNRFHCHFSPRDWQRLINNNWGFRPKRLNFKLFNIQVKEVTDNNGVKTIANNLTSTVQVFTDSDYQLPYVLGSAHEGCLPPFPADVFMIPQYGYLTLNDGSQAVGRSSFYCLEYFPSQMLRTGNNFQFSYEFENVPFHSSYAHSQSLDRLMNPLIDQYLYYLSRTIILGTGTSQTLKFSVAGPSNMAVQGRNYIPGPSYRQQRVSTTVTQNNNSEFAWPGASSWALNGRNSLMNPGPAMASHKEGEDRFFPLSGSLIFGKQGTGRDNVDADKVMITNEEEIKTTNPVATESYGQVATNHQSAQTRTNPEAAQAQTGWVQNQGILPGMVWQDRDVYLQGPIWAKIPHTDGNFHPSPLMGGFGMKHPPPQILIKNTPVPADPPTAFNKDKLNSFITQYSTGQVSVEIEWELQKENSKRWNPEIQYTSNYYKSNNVEFAVNTEGVYSEPRPIGTRYLTRNL

SEQ ID NO: 1240 - protein, 743 aa, synthetic construct
  source 1..743: note = Description of Artificial Sequence: Synthetic polypeptide
MAADGYLPDWLEDNLSEGIREWWALKPGAPQPKANQQHQDNARGLVLPGYKYLGPGNGLDKGEPVNAADAAALEHDKAYDQQLKAGDNPYLKYNHADAEFQERLKEDTSFGGNLGRAVFQAKKRLLEPLGLVEEAAKTAPGKKRPVEQSPQEPDSSAGIGKSGAQPAKKRLNFGQTGDTESVPDPQPIGEPPAAPSGVGSLTMASGGGAPVADNNEGADGVGSSSGNWHCDSQWLGDRVITTSTRTWALPTYNNHLYKQISNSTSGGSSNDNAYFGYSTPWGYFDFNRFHCHFSPRDWQRLINNNWGFRPKRLNFKLFNIQVKEVTDNNGVKTIANNLTSTVQVFTDSDYQLPYVLGSAHEGCLPPFPADVFMIPQYGYLTLNDGSQAVGRSSFYCLEYFPSQMLRTGNNFQFSYEFENVPFHSSYAHSQSLDRLMNPLIDQYLYYLSRTIILGTGTSQTLKFSVAGPSNMAVQGRNYIPGPSYRQQRVSTTVTQNNNSEFAWPGASSWALNGRNSLMNPGPAMASHKEGEDRFFPLSGSLIFGKQGTGRDNVDADKVMITNEEEIKTTNPVATESYGQVATNHQSAQNGGTSSSAQAQTGWVQNQGILPGMVWQDRDVYLQGPIWAKIPHTDGNFHPSPLMGGFGMKHPPPQILIKNTPVPADPPTAFNKDKLNSFITQYSTGQVSVEIEWELQKENSKRWNPEIQYTSNYYKSNNVEFAVNTEGVYSEPRPIGTRYLTRNL

SEQ ID NO: 1241 - protein, 7 aa, synthetic construct
  source 1..7: note = Description of Artificial Sequence: Synthetic peptide
TLAVPFK

SEQ ID NO: 1242 - protein, 7 aa, synthetic construct
  source 1..7: note = Description of Artificial Sequence: Synthetic peptide
KFPVALT

SEQ ID NO: 1243 - protein, 6 aa, synthetic construct
  source 1..6: note = Description of Artificial Sequence: Synthetic peptide
LAVPFK

SEQ ID NO: 1244 - protein, 5 aa, synthetic construct
  source 1..5: note = Description of Artificial Sequence: Synthetic peptide
AVPFK

SEQ ID NO: 1245 - protein, 4 aa, synthetic construct
  source 1..4: note = Description of Artificial Sequence: Synthetic peptide
VPFK

SEQ ID NO: 1246 - protein, 6 aa, synthetic construct
  source 1..6: note = Description of Artificial Sequence: Synthetic peptide
TLAVPF

SEQ ID NO: 1247 - protein, 5 aa, synthetic construct
  source 1..5: note = Description of Artificial Sequence: Synthetic peptide
TLAVP

SEQ ID NO: 1248 - protein, 4 aa, synthetic construct
  source 1..4: note = Description of Artificial Sequence: Synthetic peptide
TLAV

SEQ ID NO: 1249 - protein, 7 aa, synthetic construct
  source 1..7: note = Description of Artificial Sequence: Synthetic peptide
SVSKPFL

SEQ ID NO: 1250 - protein, 7 aa, synthetic construct
  source 1..7: note = Description of Artificial Sequence: Synthetic peptide
FTLTTPK

SEQ ID NO: 1251 - protein, 7 aa, synthetic construct
  source 1..7: note = Description of Artificial Sequence: Synthetic peptide
MNATKNV

SEQ ID NO: 1252 - protein, 7 aa, synthetic construct
  source 1..7: note = Description of Artificial Sequence: Synthetic peptide
QSSQTPR

SEQ ID NO: 1253 - protein, 7 aa, synthetic construct
  source 1..7: note = Description of Artificial Sequence: Synthetic peptide
ILGTGTS

SEQ ID NO: 1254 - protein, 7 aa, synthetic construct
  source 1..7: note = Description of Artificial Sequence: Synthetic peptide
TRTNPEA

SEQ ID NO: 1255 - protein, 7 aa, synthetic construct
  source 1..7: note = Description of Artificial Sequence: Synthetic peptide
NGGTSSS

SEQ ID NO: 1256 - protein, 7 aa, synthetic construct
  source 1..7: note = Description of Artificial Sequence: Synthetic peptide
YTLSQGW

SEQ ID NO: 1257 - DNA, 21 bp, synthetic construct
  source 1..21: mol_type = other DNA; note = Description of Artificial Sequence: Synthetic oligonucleotide
aagtttcctgtggcgttgact

SEQ ID NO: 1258 - DNA, 21 bp, synthetic construct
  source 1..21: mol_type = other DNA; note = Description of Artificial Sequence: Synthetic oligonucleotide
actttggcggtgccttttaag

SEQ ID NO: 1259 - DNA, 21 bp, synthetic construct
  source 1..21: mol_type = other DNA; note = Description of Artificial Sequence: Synthetic oligonucleotide
agtgtgagtaagccttttttg

SEQ ID NO: 1260 - DNA, 21 bp, synthetic construct
  source 1..21: mol_type = other DNA; note = Description of Artificial Sequence: Synthetic oligonucleotide
tttacgttgacgacgcctaag

SEQ ID NO: 1261 - DNA, 21 bp, synthetic construct
  source 1..21: mol_type = other DNA; note = Description of Artificial Sequence: Synthetic oligonucleotide
atgaatgctacgaagaatgtg

SEQ ID NO: 1262 - DNA, 21 bp, synthetic construct
  source 1..21: mol_type = other DNA; note = Description of Artificial Sequence: Synthetic oligonucleotide
cagtcgtcgcagacgcctagg

SEQ ID NO: 1263 - DNA, 21 bp, synthetic construct
  source 1..21: mol_type = other DNA; note = Description of Artificial Sequence: Synthetic oligonucleotide
attctggggactggtacttcg

SEQ ID NO: 1264 - DNA, 21 bp, synthetic construct
  source 1..21: mol_type = other DNA; note = Description of Artificial Sequence: Synthetic oligonucleotide
acgcggactaatcctgaggct

SEQ ID NO: 1265 - DNA, 21 bp, synthetic construct
  source 1..21: mol_type = other DNA; note = Description of Artificial Sequence: Synthetic oligonucleotide
aatggggggactagtagttct

SEQ ID NO: 1266 - DNA, 21 bp, synthetic construct
  source 1..21: mol_type = other DNA; note = Description of Artificial Sequence: Synthetic oligonucleotide
tatactttgtcgcagggttgg

SEQ ID NO: 1267 - protein, 9 aa, synthetic construct
  source 1..9: note = Description of Artificial Sequence: Synthetic peptide; note = AAV capsid CD8+ T-cell epitope for AAV2
SADNNNSEY

SEQ ID NO: 1268 - protein, 9 aa, synthetic construct
  source 1..9: note = Description of Artificial Sequence: Synthetic peptide; note = AAV capsid CD8+ T-cell epitope for AAV2
LIDQYLYYL

SEQ ID NO: 1269 - protein, 9 aa, synthetic construct
  source 1..9: note = Description of Artificial Sequence: Synthetic peptide; note = AAV capsid CD8+ T-cell epitope for AAV2
VPQYGYLTL

SEQ ID NO: 1270 - protein, 9 aa, synthetic construct
  source 1..9: note = Description of Artificial Sequence: Synthetic peptide; note = AAV capsid CD8+ T-cell epitope for AAV2
TTSTRTWAL

SEQ ID NO: 1271 - protein, 9 aa, synthetic construct
  source 1..9: note = Description of Artificial Sequence: Synthetic peptide; note = AAV capsid CD8+ T-cell epitope for AAV2
YHLNGRDSL

SEQ ID NO: 1272 - protein, 9 aa, synthetic construct
  source 1..9: note = Description of Artificial Sequence: Synthetic peptide; note = AAV capsid CD8+ T-cell epitope for AAV2
SQAVGRSSF

SEQ ID NO: 1273 - protein, 9 aa, synthetic construct
  source 1..9: note = Description of Artificial Sequence: Synthetic peptide; note = AAV capsid CD8+ T-cell epitope for AAV2
VPANPSTTF

SEQ ID NO: 1274 - protein, 9 aa, synthetic construct
  source 1..9: note = Description of Artificial Sequence: Synthetic peptide; note = AAV capsid CD8+ T-cell epitope for AAV2
FPQSGVLIF

SEQ ID NO: 1275 - protein, 15 aa, synthetic construct
  source 1..15: note = Description of Artificial Sequence: Synthetic peptide; note = AAV capsid CD8+ T-cell epitope for AAV2
YFDFNRFHCHFSPRD

SEQ ID NO: 1276 - protein, 15 aa, synthetic construct
  source 1..15: note = Description of Artificial Sequence: Synthetic peptide; note = AAV capsid CD8+ T-cell epitope for AAV2
VGNSSGNWHCDSTWM

SEQ ID NO: 1277 - protein, 15 aa, synthetic construct
  source 1..15: note = Description of Artificial Sequence: Synthetic peptide; note = AAV capsid CD8+ T-cell epitope for AAV2
QFSQAGASDIRDQSR

SEQ ID NO: 1278 - protein, 13 aa, synthetic construct
  source 1..13: note = Description of Artificial Sequence: Synthetic peptide; note = AAV capsid CD8+ T-cell epitope for AAV2
GASDIRQSRNWLP

SEQ ID NO: 1279 - protein, 15 aa, synthetic construct
  source 1..15: note = Description of Artificial Sequence: Synthetic peptide; note = AAV capsid CD8+ T-cell epitope for AAV2
GNRQAATADVNTQGV

SEQ ID NO: 1280 - protein, 9 aa, synthetic construct
  source 1..9: note = Description of Artificial Sequence: Synthetic peptide; note = AAV capsid CD8+ T-cell epitope for AAV1
LDRLMNPLI

SEQ ID NO: 1281 - protein, 9 aa, synthetic construct
  source 1..9: note = Description of Artificial Sequence: Synthetic peptide; note = AAV capsid CD8+ T-cell epitope for AAV1
QPAKKRLNF

SEQ ID NO: 1282 - protein, 7 aa, synthetic construct
  source 1..7: note = Description of Artificial Sequence: Synthetic peptide
QAVRTSL

SEQ ID NO: 1283 - protein, 7 aa, synthetic construct
  source 1..7: note = Description of Artificial Sequence: Synthetic peptide
LAKERLS
